(19) United States
(12) Patent Application Publication
(10) Pub. No.: US 2023/0279423 A1
(43) Pub. Date: Sep. 7, 2023

(54) COMPOSITIONS COMPRISING CURONS AND USES THEREOF

(71) Applicant: FLAGSHIP PIONEERING INNOVATIONS V, INC., Cambridge, MA (US)

(72) Inventors: Avak Kahvejian, Lexington, MA (US); Erica Gabrielle Weinstein, Newton, MA (US); Nicholas McCartney Plugis, Boston, MA (US); Kevin James Lebo, Weymouth, MA (US); Fernando Martin Diaz, New York, NY (US); Dhananjay Maniklal Nawandar, Waltham, MA (US)

(21) Appl. No.: 17/812,896

(22) Filed: Jul. 15, 2022

Related U.S. Application Data
(63) Continuation of application No. 17/531,423, filed on Nov. 19, 2021, now abandoned.
Application No. 17/531,423 is a continuation of application No. 17/226,430, filed on Apr. 9, 2021, now abandoned.
Application No. 17/226,430 is a continuation of application No. 17/005,595, filed on Aug. 28, 2020, now abandoned.
Application No. 17/005,595 is a continuation of application No. 16/744,363, filed on Jan. 16, 2020, now abandoned.
Application No. 16/744,363 is a continuation of application No. 16/366,571, filed on Mar. 27, 2019, now abandoned.
Application No. 16/366,571 is a continuation of application No. PCT/US2018/037379, filed on Jun. 13, 2018.
(60) Provisional application No. 62/676,730, filed on May 25, 2018.
(60) Provisional application No. 62/597,387, filed on Dec. 11, 2017.
(60) Provisional application No. 62/518,898, filed on Jun. 13, 2017.

(51) Int. Cl. C12N 15/86; C12N 7/00; C12N 15/113; C07K 14/005

(52) U.S. Cl. CPC C12N 15/86; C12N 7/00; C12N 15/1136; C07K 14/005; C12N 15/113; C12N 2750/00022; C12N 2750/00043; C12N 2750/00021; C12N 2310/141; C12N 2320/32

(57) ABSTRACT

This invention relates generally to pharmaceutical compositions and preparations of curons and uses thereof.

### RELATED APPLICATIONS

[0001] This application is a Continuation of U.S. Ser. No. 17/531,423, filed Nov. 19, 2021, which is a Continuation of U.S. Ser. No. 17/226,430, filed Apr. 9, 2021, which is a Continuation of U.S. Ser. No. 17/005,595, filed Aug. 28, 2020, which is a Continuation of U.S. Ser. No. 16/744,363, filed Jan. 16, 2020, which is a Continuation of U.S. Ser. No. 16/366,571, filed Mar. 27, 2019, which is a Continuation of International Application No. PCT/US2018/037379, filed Jun. 13, 2018, which claims priority to U.S. Ser. No. 62/518,898 filed Jun. 13, 2017, U.S. Ser. No. 62/597,387 filed Dec. 11, 2017, and U.S. Ser. No. 62/676,730 filed May 25, 2018, each of which is incorporated herein by reference in its entirety.

### SEQUENCE LISTING

[0002] The instant application contains a Sequence Listing which has been submitted electronically in XML format and is hereby incorporated by reference in its entirety. Said XML copy, created on Jul. 15, 2018, is named V2057-700025_SL.xml and is 1,235,351 bytes in size.

### BACKGROUND

[0003] Existing viral systems for delivering therapeutic agents utilize viruses that can be associated with diseases or disorders, and can be highly immunogenic. There exists a need in the art for improved delivery vehicles that are substantially non-immunogenic and non-pathogenic.

### SUMMARY

[0004] The present disclosure provides a curon, e.g., a synthetic curon, that can be used as a delivery vehicle, e.g., for delivering a therapeutic agent to a eukaryotic cell. In some embodiments, a curon comprises a particle comprising a genetic element encapsulated in a proteinaceous exterior, which is capable of introducing the genetic element into a cell (e.g., a human cell). In some instances, the genetic element comprises a payload, e.g., it encodes an exogenous effector (e.g., a nucleic acid effector, such as a non-coding RNA, or a polypeptide effector, e.g., a protein) that is expressed in the cell. For example, the curon can deliver an exogenous effector into a cell by contacting the cell and introducing a genetic element encoding the exogenous effector into the cell, such that the exogenous effector is made or expressed by the cell. The exogenous effector can, in some instances, modulate a function of the cell or modulate an activity or level of a target molecule in the cell. For example, the exogenous effector may decrease viability of a cancer cell (e.g., as described in Example 22) or decrease levels of a target protein, e.g., interferon, in the cell (e.g., as described in Examples 3 and 4). In another example, the exogenous effector may be a protein expressed by the cell (e.g., as described in Example 9).

[0005] A synthetic curon has at least one structural difference compared to a wild-type virus, e.g., a deletion, insertion, substitution, enzymatic modification, relative to a wild-type virus. Generally, synthetic curons include an exogenous genetic element enclosed within a proteinaceous exterior, which can be used as substantially non-immunogenic vehicles for delivering the genetic element, or an effector (e.g., an exogenous effector or an endogenous effector) encoded therein (e.g., a polypeptide or nucleic acid effector), into eukaryotic cells. Curons can be used for treatment of diseases and disorders, e.g., by delivering a therapeutic agent to a desired cell or tissue. The genetic element of a synthetic curon of the present disclosure can be a circular single-stranded DNA molecule, and generally includes a protein binding sequence that binds to the proteinaceous exterior, or a polypeptide attached thereto, which may facilitate enclosure of the genetic element within the proteinaceous exterior and/or enrichment of the genetic element, relative to other nucleic acids, within the proteinaceous exterior.

[0006] In an aspect, the invention features a synthetic curon comprising (i) a genetic element comprising a promoter element, a sequence encoding an exogenous effector, (e.g., a payload), and a protein binding sequence (e.g., an exterior protein binding sequence, e.g., a packaging signal). In some embodiments, the genetic element is a single-stranded DNA. Alternatively or in combination, the genetic element has one or both of the following properties: is circular and/or integrates into the genome of a eukaryotic cell at a frequency of less than about 0.001%, 0.005%, 0.01%, 0.05%, 0.1%, 0.5%, 1%, 1.5%, or 2% of the genetic element that enters the cell; and (ii) a proteinaceous exterior. In some embodiments, the genetic element is enclosed within the proteinaceous exterior. In some embodiments, the synthetic curon is capable of delivering the genetic element into a eukaryotic cell.

[0007] In an aspect, the invention features a synthetic curon comprising: (i) a genetic element comprising a promoter element and a sequence encoding an exogenous effector (e.g., a payload), and a protein binding sequence (e.g., an exterior protein binding sequence); and (ii) a proteinaceous exterior; wherein the genetic element is enclosed within the proteinaceous exterior; and wherein the synthetic curon is capable of delivering the genetic element into a eukaryotic cell. In some embodiments, the genetic element comprises a nucleic acid sequence (e.g., a nucleic acid sequence of between 300-4000 nucleotides, e.g., between 300-3500 nucleotides, between 300-3000 nucleotides, between 300-2500 nucleotides, between 300-2000 nucleotides, between 300-1500 nucleotides) having at least 75% (e.g., at least 75, 76, 77, 78, 79, 80, 90, 91, 92, 93, 94, 95, 96, 97, 98, 99, or 100%) sequence identity to a sequence of a wild-type Anellovirus (e.g., a wild-type Torque Teno virus (TTV), Torque Teno mini virus (TTMV), or TTMDV sequence, e.g., a wild-type Anellovirus sequence as listed in any of Tables 1, 3, 5, 7, 9, 11, or 13). In some embodiments, the genetic element comprises a nucleic acid sequence (e.g., a nucleic acid sequence of at least 300 nucleotides, 500 nucleotides, 1000 nucleotides, 1500 nucleotides, 2000 nucleotides, 2500 nucleotides, 3000 nucleotides or more) having at least 75% (e.g., at least 75, 76, 77, 78, 79, 80, 90, 91, 92, 93, 94, 95, 96, 97, 98, 99, or 100%) sequence identity to a sequence of a wild-type Anellovirus (e.g., a wild-type Torque Teno virus (TTV), Torque Teno mini virus (TTMV), or TTMDV sequence, e.g., a wild-type Anellovirus sequence as listed in any of Tables 1, 3, 5, 7, 9, 11, or 13).

[0008] In an aspect, the invention features a method of treating a disease or disorder in a subject, the method comprising administering to the subject a curon, e.g., a synthetic curon, e.g., as described herein. In some embodiments, the curon comprises: (i) a genetic element comprising a promoter element and a sequence encoding an effector, e.g., a payload, and an exterior protein binding sequence. In some embodiments, the genetic element is a single-stranded DNA, and wherein the genetic element is circular and/or integrates at a frequency of less than about 0.001%, 0.005%, 0.01%, 0.05%, 0.1%, 0.5%, 1%, 1.5%, or 2% of the genetic element that enters the cell; and (ii) a proteinaceous exterior; wherein the genetic element is enclosed within the proteinaceous exterior; and wherein the curon is capable of delivering the genetic element into a eukaryotic cell.

[0009] In an aspect, the invention features a method of delivering a payload to a cell, tissue or subject, the method comprising administering to the subject a curon, e.g., a synthetic curon, e.g., as described herein, wherein the curon comprises a nucleic acid sequence encoding the payload. In some embodiments, the curon comprises: (i) a genetic element comprising a promoter element and a sequence encoding an effector, e.g., a payload, and an exterior protein binding sequence. In some embodiments, the genetic element is a single-stranded DNA, and wherein the genetic element is circular and/or integrates at a frequency of less than about 0.001%, 0.005%, 0.01%, 0.05%, 0.1%, 0.5%, 1%, 1.5%, or 2% of the genetic element that enters the cell; and (ii) a proteinaceous exterior; wherein the genetic element is enclosed within the proteinaceous exterior; and wherein the curon is capable of delivering the genetic element into a eukaryotic cell. In embodiments, the payload is a nucleic acid. In embodiments, the payload is a protein.

[0010] In an aspect, the invention features a method of delivering a synthetic curon to a cell, comprising contacting the synthetic curon described herein, e.g., of any of the aspects herein (e.g., the preceding aspects) with a cell, e.g., a eukaryotic cell, e.g., a mammalian cell.

[0011] In an aspect, the invention features a pharmaceutical composition comprising a curon (e.g., a synthetic curon) as described herein. In embodiments, the pharmaceutical composition further comprises a pharmaceutically acceptable carrier or excipient. In embodiments, the pharmaceutical composition comprises a dose comprising about 10⁵-10⁴ genome equivalents of the curon per kilogram.

[0012] In an aspect, the invention features a nucleic acid molecule comprising a genetic element comprising a promoter element and a sequence encoding an effector, e.g., a payload, and an exterior protein binding sequence. In embodiments, the genetic element is a single-stranded DNA, and wherein the genetic element is circular and/or integrates at a frequency of less than about 0.001%, 0.005%, 0.01%, 0.05%, 0.1%, 0.5%, 1%, 1.5%, or 2% of the genetic element that enters the cell. In embodiments, the effector does not originate from TTV and is not an SV40-miR-S1. In embodiments, the nucleic acid molecule does not comprise the polynucleotide sequence of TTMV-LY. In embodiments, the promoter element is capable of directing expression of the effector in a eukaryotic cell.

[0013] In an aspect, the invention features a genetic element comprising one, two, or three of: (i) a promoter element and a sequence encoding an effector, e.g., a payload; wherein the effector is exogenous relative to a wild-type Anellovirus sequence; (ii) at least 72 contiguous nucleotides (e.g., at least 72, 73, 74, 75, 76, 77, 78, 79, 80, 90, 100, or 150 nucleotides) having at least 75% (e.g., at least 75, 76, 77, 78, 79, 80, 90, 91, 92, 93, 94, 95, 96, 97, 98, 99, or 100%) sequence identity to a wild-type Anellovirus sequence; or at least 100 (e.g., at least 300, 500, 1000, 1500) contiguous nucleotides having at least 72% (e.g., at least 72, 73, 74, 75, 76, 77, 78, 79, 80, 90, 91, 92, 93, 94, 95, 96, 97, 98, 99, or 100%) sequence identity to a wild-type Anellovirus sequence; and (iii) a protein binding sequence, e.g., an exterior protein binding sequence, and wherein the nucleic acid construct is a single-stranded DNA; and wherein the nucleic acid construct is circular and/or integrates at a frequency of less than about 0.001%, 0.005%, 0.01%, 0.05%, 0.1%, 0.5%, 1%, 1.5%, or 2% of the genetic element that enters the cell.

[0014] In an aspect, the invention features a method of manufacturing a synthetic curon composition, comprising:
[0015] a) providing a host cell comprising, e.g., expressing one or more components (e.g., all of the components) of a curon, e.g., a synthetic curon, e.g., as described herein;
[0016] b) producing a preparation of curons from the host cell, wherein the synthetic curons of the preparation comprise a proteinaceous exterior and a genetic element comprising a promoter element, a sequence encoding an exogenous effector, (e.g., a payload), and a protein binding sequence (e.g., an exterior protein binding sequence, e.g., a packaging signal), thereby making a preparation of synthetic curon; and
[0017] c) formulating the preparation of synthetic curons, e.g., as a pharmaceutical composition suitable for administration to a subject.

[0018] In an aspect, the invention features a method of manufacturing a synthetic curon composition, comprising: a) providing a plurality of synthetic curon described herein, or a pharmaceutical composition described herein; and b) formulating the synthetic curons, e.g., as a pharmaceutical composition suitable for administration to a subject.

[0019] In an aspect, the invention features a method of making a host cell, e.g., a first host cell or a producer cell (e.g., as shown in FIG. 12), e.g., a population of first host cells, comprising a synthetic curon, the method comprising introducing a genetic element, e.g., as described herein, to a host cell and culturing the host cell under conditions suitable for production of the synthetic curon. In embodiments, the method further comprises introducing a helper, e.g., a helper virus, to the host cell. In embodiments, the introducing comprises transfection (e.g., chemical transfection) or electroporation of the host cell with the synthetic curon.

[0020] In an aspect, the invention features a method of making a synthetic curon, comprising providing a host cell, e.g., a first host cell or producer cell (e.g., as shown in FIG. 12), comprising a synthetic curon, e.g., as described herein, and purifying the curon from the host cell. In some embodiments, the method further comprises, prior to the providing step, contacting the host cell with a synthetic curon, e.g., as described herein, and incubating the host cell under conditions suitable for production of the synthetic curon. In embodiments, the host cell is the first host cell or producer cell described in the above method of making a host cell. In embodiments, purifying the curon from the host cell comprises lysing the host cell.

[0021] In some embodiments, the method further comprises a second step of contacting the synthetic curon produced by the first host cell or producer cell with a second host cell, e.g., a permissive cell (e.g., as shown in FIG. 12), e.g., a population of second host cells. In some embodiments, the method further comprises incubating the second host cell inder conditions suitable for production of the synthetic curon. In some embodiments, the method further comprises purifying a synthetic curon from the second host cell, e.g., thereby producing a curon seed population. In embodiments, at least about 2-100-fold more of the synthetic curon is produced from the population of second host cells than from the population of first host cells. In embodiments, purifying the curon from the second host cell comprises lysing the second host cell.

[0022] In some embodiments, the method further comprises a second step of contacting the synthetic curon produced by the second host cell with a third host cell, e.g., permissive cells (e.g., as shown in FIG. 12), e.g., a population of third host cells. In some embodiments, the method further comprises incubating the third host cell inder conditions suitable for production of the synthetic curon. In some embodiments, the method further comprises purifying a synthetic curon from the third host cell, e.g., thereby producing a curon stock population. In embodiments, purifying the curon from the third host cell comprises lysing the third host cell. In embodiments, at least about 2-100-fold more of the synthetic curon is produced from the population of third host cells than from the population of second host cells.

[0023] In some embodiments, the method further comprises evaluating one or more synthetic curons from the curon seed population or the curon stock population for one or more quality control parameters, e.g., purity, titer, potency (e.g., in genomic equivalents per curon particle), and/or the nucleic acid sequence, e.g., from the genetic element comprised by the synthetic curon. In some embodiments, the evaluated nucleic acid sequence comprises the nucleic acid sequence encoding an exogenous effector.

[0024] In an aspect, the invention comprises evaluating one or more synthetic curons, e.g., from a curon seed population or a curon stock population, for one or more quality control parameters, e.g., purity, titer, potency, and/or the nucleic acid sequence, e.g., from the genetic element comprised by the synthetic curon. In some embodiments, the evaluated nucleic acid sequence comprises the nucleic acid sequence encoding an exogenous effector.

[0025] In an aspect, the invention features a reaction mixture comprising a synthetic curon described herein and a helper virus, wherein the helper virus comprises a polynucleotide, e.g., a polynucleotide encoding an exterior protein, (e.g., an exterior protein capable of binding to the exterior protein binding sequence and, optionally, a lipid envelope), a polynucleotide encoding a replication protein (e.g., a polymerase), or any combination thereof.

[0026] In some embodiments, a curon (e.g., a synthetic curon) is isolated, e.g., isolated from a host cell and/or isolated from other constituents in a solution (e.g., a supernatant). In some embodiments, a curon (e.g., a synthetic curon) is purified, e.g., from a solution (e.g., a supernatant). In some embodiments, a curon is enriched in a solution relative to other constituents in the solution.

[0027] In some embodiments of any of the aforesaid curons, compositions or methods, the genetic element comprises a minimal curon genome, e.g., as identified according to the method described in Example 9. In some embodiments, the minimal curon genome comprises a minimal Anellovirus genome sufficient for replication of the curon (e.g., in a host cell). In embodiments, the minimal curon genome comprises a TTV-tth8 nucleic acid sequence, e.g., a TTV-tth8 nucleic acid sequence shown in Table 5, having deletions of at least 10%, 20%, 30%, 40%, 50%, 60%, 70%, 80%, 90%, 95%, 99%, or 100% of nucleotides 3436-3707 of the TTV-tth8 nucleic acid sequence. In embodiments, the minimal curon genome comprises a TTMV-LY2 nucleic acid sequence, e.g., a TTMV-LY2 nucleic acid sequence shown in Table 11, having deletions of at least 10%, 20%, 30%, 40%, 50%, 60%, 70%, 80%, 90%, 95%, 99%, or 100% of nucleotides 574-1371, 1432-2210, 574-2210, and/or 2610-2809 of the TTMV-LY2 nucleic acid sequence. In embodiments, the minimal curon genome is a minimal curon genome capable of self-replication and/or self-amplification. In embodiments, the minimal curon genome is a minimal curon genome capable of replicating or being amplified in the presence of a helper, e.g., a helper virus.

[0028] Additional features of any of the aforesaid curons, compositions or methods include one or more of the following enumerated embodiments.

[0029] Those skilled in the art will recognize, or be able to ascertain using no more than routine experimentation, many equivalents to the specific embodiments of the invention described herein. Such equivalents are intended to be encompassed by the following enumerated embodiments.

### Enumerated Embodiments

[0030] 1. A synthetic curon comprising:
[0031] (i) a genetic element comprising a promoter element, a nucleic acid sequence (e.g., a DNA sequence) encoding an exogenous effector, (e.g., a payload), and a protein binding sequence (e.g., an exterior protein binding sequence, e.g., a packaging signal), wherein the genetic element is a single-stranded DNA, and has one or both of the following properties: is circular and/or integrates into the genome of a eukaryotic cell at a frequency of less than about 0.001%, 0.005%, 0.01%, 0.05%, 0.1%, 0.5%, 1%, 1.5%, or 2% of the genetic element that enters the cell; and
[0032] (ii) a proteinaceous exterior;
[0033] wherein the genetic element is enclosed within the proteinaceous exterior; and
[0034] wherein the synthetic curon is capable of delivering the genetic element into a eukaryotic cell.

[0035] 2. A synthetic curon comprising:
[0036] (i) a genetic element comprising a promoter element and a nucleic acid sequence (e.g., a DNA sequence) encoding an exogenous effector (e.g., a payload), and a protein binding sequence (e.g., an exterior protein binding sequence),
[0037] wherein the genetic element has at least 75% (e.g., at least 75, 76, 77, 78, 79, 80, 85, 90, 91, 92, 93, 94, 95, 96, 97, 98, 99, or 100%) sequence identity to a wild-type Anellovirus sequence (e.g., a wild-type Torque Teno virus (TTV), Torque Teno mini virus (TTMV), or TTMDV sequence, e.g., a wild-type Anellovirus sequence, e.g., as listed in any of Tables 1, 3, 5, 7, 9, 11, or 13); and
[0038] (ii) a proteinaceous exterior;
[0039] wherein the genetic element is enclosed within the proteinaceous exterior; and
[0040] wherein the synthetic curon is capable of delivering the genetic element into a eukaryotic cell.

[0041] 3. A synthetic curon comprising:
[0042] (i) a genetic element comprising a promoter element and a nucleic acid sequence (e.g., a DNA sequence) encoding an effector (e.g., an exogenous effector or endogenous effector, e.g., endogenous miRNA), and a protein binding sequence (e.g., an exterior protein binding sequence),
[0043] wherein the genetic element has at least 75% (e.g., at least 75, 76, 77, 78, 79, 80, 85, 90, 91, 92, 93, 94, 95, 96, 97, 98, 99, or 100%) sequence identity to a wild-type Anellovirus sequence (e.g., a wild-type Torque Teno virus (TTV), Torque Teno mini virus (TTMV), or TTMDV sequence, e.g., a wild-type Anellovirus sequence, e.g., as listed in any of Tables 1, 3, 5, 7, 9, 11, or 13); and
[0044] wherein the genetic element is not a naturally occurring sequence (e.g., comprises a deletion, substitution, or insertion relative to a wild-type Anellovirus sequence (e.g., a wild-type Torque Teno virus (TTV), Torque Teno mini virus (TTMV), or TTMDV sequence, e.g., a wild-type Anellovirus sequence, e.g., as listed in any of Tables 1, 3, 5, 7, 9, 11, or 13);
[0045] (ii) a proteinaceous exterior;
[0046] wherein the genetic element is enclosed within the proteinaceous exterior; and
[0047] wherein the synthetic curon is capable of delivering the genetic element into a eukaryotic cell.

[0048] 4. A synthetic curon comprising:
[0049] (i) a genetic element comprising a promoter element and a nucleic acid sequence (e.g., a DNA sequence) encoding an exogenous effector (e.g., a payload), and a protein binding sequence (e.g., an exterior protein binding sequence),
[0050] wherein the protein binding sequence has at least 75% (e.g., at least 75, 76, 77, 78, 79, 80, 85, 90, 91, 92, 93, 94, 95, 96, 97, 98, 99, or 100%) sequence identity to the Consensus 5′ UTR sequence shown in Table 16-1, or to the Consensus GC-rich sequence shown in Table 16-2, or both of the Consensus 5′ UTR sequence shown in Table 16-1 and to the Consensus GC-rich sequence shown in Table 16-2; and
[0051] (ii) a proteinaceous exterior;
[0052] wherein the genetic element is enclosed within the proteinaceous exterior; and
[0053] wherein the synthetic curon is capable of delivering the genetic element into a eukaryotic cell.

[0054] 5. A synthetic curon comprising:
[0055] (i) a genetic element comprising a promoter element and a nucleic acid sequence encoding an exogenous effector, and a protein binding sequence, wherein the genetic element comprises one or both of:
   [0056] (a) a sequence having at least 85% sequence identity to the Anellovirus 5′ UTR conserved domain nucleotide sequence of nucleotides 323-393 of the nucleic acid sequence of Table 11, or
   [0057] (b) a sequence having at least 85% sequence identity to the Anellovirus GC-rich region of nucleotides 2868-2929 of the nucleic acid sequence of Table 11;
[0058] and
[0059] (ii) a proteinaceous exterior; wherein the genetic element is enclosed within the proteinaceous exterior; and
[0060] wherein the synthetic curon is capable of delivering the genetic element into a eukaryotic cell.

[0061] 6. A synthetic curon comprising:
[0062] (i) a genetic element comprising a promoter element and a nucleic acid sequence encoding an exogenous effector, and a protein binding sequence, wherein the genetic element comprises one or both of:
   [0063] (a) a sequence having at least 85% sequence identity to the Anellovirus 5′ UTR conserved domain of the nucleic acid sequence of Table 1, 3, 5, 7, 9 or 13; or
   [0064] (b) a sequence having at least 85% sequence identity to the Anellovirus GC-rich region of the nucleic acid sequence of of Table 1, 3, 5, 7, 9 or 13;
[0065] and
[0066] (ii) a proteinaceous exterior; wherein the genetic element is enclosed within the proteinaceous exterior; and
[0067] wherein the synthetic curon is capable of delivering the genetic element into a eukaryotic cell.

[0068] 7. The synthetic curon of any of the preceding embodiments, wherein the promoter element comprises an RNA polymerase II-dependent promoter, an RNA polymerase III-dependent promoter, a PGK promoter, a CMV promoter, an EF-1α promoter, an SV40 promoter, a CAGG promoter, or a UBC promoter, TTV viral promoters, Tissue specific, U6 (pollIII), minimal CMV promoter with upstream DNA binding sites for activator proteins (TetR-VP16, Gal4-VP16, dCas9-VP16, etc).

[0069] 8. The synthetic curon of any of the preceding embodiments, wherein the promoter element comprises a TATA box.

[0070] 9. The synthetic curon of any of the preceding embodiments, wherein the promoter element is endogenous to a wild-type Anellovirus, e.g., a wild-type Anellovirus sequence as listed in any of Tables 1, 3, 5, 6, 9, 11, or 13.

[0071] 10. The synthetic curon of any of embodiments 1-8, wherein the promoter element is exogenous to wild-type Anellovirus.

[0072] 11. The synthetic curon of any of the preceding embodiments, wherein the exogenous effector encodes a therapeutic agent, e.g., a therapeutic peptide or polypeptide or a therapeutic nucleic acid.

[0073] 12. The synthetic curon of any of the preceding embodiments, wherein the exogenous effector comprises a regulatory nucleic acid, e.g., an miRNA, siRNA, mRNA, lncRNA, RNA, DNA, an antisense RNA, gRNA; a fluorescent tag or marker, an antigen, a peptide, a synthetic or analog peptide from a naturally-bioactive peptide, an agonist or antagonist peptide, an anti-microbial peptide, a pore-forming peptide, a bicyclic peptide, a targeting or cytotoxic peptide, a degradation or self-destruction peptide, a small molecule, an immune effector (e.g., influences susceptibility to an immune response/signal), a death protein (e.g., an inducer of apoptosis or necrosis), a non-lytic inhibitor of a tumor (e.g., an inhibitor of an oncoprotein), an epigenetic modifying agent, an epigenetic enzyme, a transcription factor, a DNA or protein modification enzyme, a DNA-intercalating agent, an efflux pump inhibitor, a nuclear receptor activator or inhibitor, a proteasome inhibitor, a competitive inhibitor for an enzyme, a protein synthesis effector or inhibitor, a nuclease, a protein fragment or domain, a ligand, an antibody, a receptor, or a CRISPR system or component.

[0074] 13. The synthetic curon of any of the preceding embodiments, wherein the exogenous effector comprises a miRNA.

[0075] 14. The synthetic curon of any of the preceding embodiments, wherein the effector, e.g., miRNA, targets a host gene, e.g., modulates expression of the gene, e.g., increases or decreases expression of the gene.

[0076] 15. The synthetic curon of any of the preceding embodiments, wherein the exogenous effector comprises an miRNA, and decreases expression of a host gene.

[0077] 16. The synthetic curon of any of the preceding embodiments, wherein the exogenous effector comprises a nucleic acid sequence about 20-200, 30-180, 40-160, 50-140, or 60-120 nucleotides in length.

[0078] 17. The synthetic curon of any of the preceding embodiments, wherein the nucleic acid sequence encoding the exogenous effector is about 20-200, 30-180, 40-160, 50-140, or 60-120 nucleotides in length.

[0079] 18. The synthetic curon of any of the preceding embodiments, wherein the sequence encoding the exogenous effector has a size of at least about 100 nucleotides.

[0080] 19. The synthetic curon of any of the preceding embodiments, wherein the sequence encoding the exogenous effector has a size of about 100 to about 5000 nucleotides.

[0081] 20. The synthetic curon of any of the preceding embodiments, wherein the sequence encoding the exogenous effector has a size of about 100-200, 200-300, 300-400, 400-500, 500-600, 600-700, 700-800, 800-900, 900-1000, 1000-1500, or 1500-2000 nucleotides.

[0082] 21. The synthetic curon of any of the preceding embodiments, wherein the sequence encoding the exogenous effector is situated at, within, or adjacent to (e.g., 5′ or 3′ to) one or more of the ORF1 locus (e.g., at the C-terminus of the ORF1 locus), the miRNA locus, the 5′ noncoding region upstream of the TATA box, the 5′ UTR, the 3′ noncoding region downstream of the poly-A region, or a noncoding region upstream of the GC-rich region of the genetic element.

[0083] 22. The synthetic curon of embodiment 21, wherein the sequence encoding the exogenous effector is located between the poly-A region and the GC-rich region of the genetic element.

[0084] 23. The synethtic curon of any of the preceding embodiments, which comprises (e.g., in the proteinaceous exterior) one or more of an amino acid sequence chosen from ORF2, ORF2/2, ORF2/3, ORF1, ORF1/1, or ORF1/2 of Table 12, or an amino acid sequence having at least 85% sequence identity thereto.

[0085] 24. The synethtic curon of any of the preceding embodiments, which comprises (e.g., in the proteinaceous exterior) one or more of an amino acid sequence chosen from ORF2, ORF2/2, ORF2/3, ORF2t/3, ORF1, ORF1/1, or ORF1/2 of any of Tables 2, 4, 6, 8, 10, or 14, or an amino acid sequence having at least 85% sequence identity thereto.

[0086] 25. The synthetic curon of any of the preceding embodiments, wherein the protein binding sequence comprises a nucleic acid sequence having at least 75% (e.g., at least 75, 76, 77, 78, 79, 80, 90, 91, 92, 93, 94, 95, 96, 97, 98, 99, or 100%) sequence identity to the 5′ UTR conserved domain or the GC-rich domain of a wild-type Anellovirus, e.g., a wild-type Anellovirus sequence as listed in any of Tables 1, 3, 5, 6, 9, 11, 13, A, or B.

[0087] 26. The synthetic curon of any of the preceding embodiments, wherein the genetic element, e.g., protein binding sequence of the genetic element, comprises least about 75% (e.g., at least 75%, 80%, 85%, 90%, 95%, 96%, 97%, 98%, 99%, or 100%) identity to the Consensus 5′ UTR nucleic acid sequence shown in Table 16-1.

[0088] 27. The synthetic curon of any of the preceding embodiments, wherein the genetic element, e.g., protein binding sequence of the genetic element, comprises least about 75% (e.g., at least 75%, 80%, 85%, 90%, 95%, 96%, 97%, 98%, 99%, or 100%) identity to the exemplary TTV 5′ UTR nucleic acid sequence shown in Table 16-1.

[0089] 28. The synthetic curon of any of the preceding embodiments, wherein the genetic element, e.g., protein binding sequence of the genetic element, comprises least about 75% (e.g., at least 75%, 80%, 85%, 90%, 95%, 96%, 97%, 98%, 99%, or 100%) identity to the TTV-CT30F 5′ UTR nucleic acid sequence shown in Table 16-1.

[0090] 29. The synthetic curon of any of the preceding embodiments, wherein the genetic element, e.g., protein binding sequence of the genetic element, comprises least about 75% (e.g., at least 75%, 80%, 85%, 90%, 95%, 96%, 97%, 98%, 99%, or 100%) identity to the TTV-HD23a 5′ UTR nucleic acid sequence shown in Table 16-1.

[0091] 30. The synthetic curon of any of the preceding embodiments, wherein the genetic element, e.g., protein binding sequence of the genetic element, comprises least about 75% (e.g., at least 75%, 80%, 85%, 90%, 95%, 96%, 97%, 98%, 99%, or 100%) identity to the TTV-JA20 5′ UTR nucleic acid sequence shown in Table 16-1.

[0092] 31. The synthetic curon of any of the preceding embodiments, wherein the genetic element, e.g., protein binding sequence of the genetic element, comprises least about 75% (e.g., at least 75%, 80%, 85%, 90%, 95%, 96%, 97%, 98%, 99%, or 100%) identity to the TTV-TJN02 5′ UTR nucleic acid sequence shown in Table 16-1.

[0093] 32. The synthetic curon of any of the preceding embodiments, wherein the genetic element, e.g., protein binding sequence of the genetic element, comprises least about 75% (e.g., at least 75%, 80%, 85%, 90%, 95%, 96%, 97%, 98%, 99%, or 100%) identity to the TTV-tth8 5′ UTR nucleic acid sequence shown in Table 16-1.

[0094] 33. The synthetic curon of any of the preceding embodiments, wherein the genetic element, e.g., protein binding sequence of the genetic element, comprises least about 75% (e.g., at least 75%, 80%, 85%, 90%, 95%, 96%, 97%, 98%, 99%, or 100%) identity to the Consensus GC-rich region shown in Table 16-2.

[0095] 34. The synthetic curon of any of the preceding embodiments, wherein the genetic element, e.g., protein binding sequence of the genetic element, comprises least about 75% (e.g., at least 75%, 80%, 85%, 90%, 95%, 96%, 97%, 98%, 99%, or 100%) identity to the exemplary TTV GC-rich region shown in Table 16-2.

[0096] 35. The synthetic curon of any of the preceding embodiments, wherein the genetic element, e.g., protein binding sequence of the genetic element, comprises least about 75% (e.g., at least 75%, 80%, 85%, 90%, 95%, 96%, 97%, 98%, 99%, or 100%) identity to the TTV-CT30F GC-rich region shown in Table 16-2.

[0097] 36. The synthetic curon of any of the preceding embodiments, wherein the genetic element, e.g., protein binding sequence of the genetic element, comprises least about 75% (e.g., at least 75%, 80%, 85%, 90%, 95%, 96%, 97%, 98%, 99%, or 100%) identity to the TTV-HD23a GC-rich region shown in Table 16-2.

[0098] 37. The synthetic curon of any of the preceding embodiments, wherein the genetic element, e.g., protein binding sequence of the genetic element, comprises least about 75% (e.g., at least 75%, 80%, 85%, 90%, 95%, 96%, 97%, 98%, 99%, or 100%) identity to the TTV-JA20 GC-rich region shown in Table 16-2.

[0099] 38. The synthetic curon of any of the preceding embodiments, wherein the genetic element, e.g., protein binding sequence of the genetic element, comprises least about 75% (e.g., at least 75%, 80%, 85%, 90%, 95%, 96%, 97%, 98%, 99%, or 100%) identity to the TTV-TJN02 GC-rich region shown in Table 16-2.

[0100] 39. The synthetic curon of any of the preceding embodiments, wherein the genetic element, e.g., protein binding sequence of the genetic element, comprises least about 75% (e.g., at least 75%, 80%, 85%, 90%, 95%, 96%, 97%, 98%, 99%, or 100%) identity to the TTV-tth8 GC-rich region shown in Table 16-2.

[0101] 40. The synthetic curon of any of the preceding embodiments, wherein at least 60% (e.g., at least 60%, 65%, 70%, 75%, 80%, 85%, 90%, 95%, or 100%) of the protein binding sequence consists of G or C.

[0102] 41. The synthetic curon of any of the preceding embodiments, wherein the genetic element comprises a sequence of at least 80, 90, 100, 110, 120, 130, or 140 nucleotides in length, which consists of G or C at at least 70% (e.g., at least 70%, 75%, 80%, 85%, 90%, 95%, 96%, 97%, 98%, 99%, or 100%) or about 70-100%, 75-95%, 80-95%, 85-95%, or 85-90% of the positions.

[0103] 42. The synthetic curon of any of the preceding embodiments, wherein the genetic element comprises a sequence having at least 85% sequence identity to the Anellovirus 5′ UTR conserved domain nucleotide sequence of nucleotides 1-393 of the nucleic acid sequence of Table 11 and a sequence having at least 85% sequence identity to the Anellovirus GC-rich region of nucleotides 2868-2929 of the nucleic acid sequence of Table 11.

[0104] 43. The synthetic curon of any of the preceding embodiments, wherein the protein binding sequence is capable of binding to an exterior protein, e.g., a capsid protein, e.g., an Anellovirus capsid protein, e.g., a capsid protein comprising an amino acid sequence having at least 75% (e.g., at least 75, 76, 77, 78, 79, 80, 90, 91, 92, 93, 94, 95, 96, 97, 98, 99, or 100%) sequence identity to any of the sequences listed in Table 1-14, 16, or 18.

[0105] 44. The synthetic curon of any of the preceding embodiments, wherein the genetic element comprises at least 75% identity to the nucleotide sequence of Table 11.

[0106] 45. The synthetic curon of any of the preceding embodiments, wherein the protein binding sequence binds an arginine-rich region of the proteinaceous exterior.

[0107] 46. The synthetic curon of any of the preceding embodiments, wherein the proteinaceous exterior comprises an exterior protein capable of specifically binding to the protein binding sequence.

[0108] 47. The synthetic curon of embodiment 46, wherein the exterior protein comprises a capsid protein e.g., an Anellovirus capsid protein, e.g., a capsid protein comprising an amino acid sequence having at least 75% (e.g., at least 75, 76, 77, 78, 79, 80, 90, 91, 92, 93, 94, 95, 96, 97, 98, 99, or 100%) sequence identity to any of the sequences listed in any of Tables 1-14, 16, or 18 or an amino acid sequence encoded by any of the sequences listed in Table 1-14, 15, 17, or 19, or a fragment thereof.

[0109] 48. The synthetic curon of any of the preceding embodiments, wherein the proteinaceous exterior comprises one or more of the following: one or more glycosylated proteins, a hydrophilic DNA-binding region, an arginine-rich region, a threonine-rich region, a glutamine-rich region, a N-terminal polyarginine sequence, a variable region, a C-terminal polyglutamine/glutamate sequence, and one or more disulfide bridges.

[0110] 49. The synthetic curon of any of the preceding embodiments, wherein the proteinaceous exterior comprises one or more of the following characteristics: an icosahedral symmetry, recognizes and/or binds a molecule that interacts with one or more host cell molecules to mediate entry into the host cell, lacks lipid molecules, lacks carbohydrates, is pH and temperature stable, is detergent resistant, and is substantially non-immunogenic or substantially non-pathogenic in a host.

[0111] 50. The synthetic curon of any of the preceding embodiments, wherein the proteinaceous exterior comprises at least one functional domain that provides one or more functions, e.g., species and/or tissue and/or cell selectivity, genetic element binding and/or packaging, immune evasion (substantial non-immunogenicity and/or tolerance), pharmacokinetics, endocytosis and/or cell attachment, nuclear entry, intracellular modulation and localization, exocytosis modulation, propagation, and nucleic acid protection.

[0112] 51. The synthetic curon of any of the preceding embodiments, wherein the portions of the genetic element excluding the effector have a combined size of about 2.5-5 kb (e.g., about 2.8-4 kb, about 2.8-3.2 kb, about 3.6-3.9 kb, or about 2.8-2.9 kb), less than about 5 kb (e.g., less than about 2.9 kb, 3.2 kb, 3.6 kb, 3.9 kb, or 4 kb), or at least 100 nucleotides (e.g., at least 1 kb).

[0113] 52. The synthetic curon of any of the preceding embodiments, wherein the genetic element is single-stranded.

[0114] 53. The synthetic curon of any of the preceding embodiments, wherein the genetic element is circular.

[0115] 54. The synthetic curon of any of the preceding embodiments, wherein the genetic element is DNA.

[0116] 55. The synthetic curon of any of the preceding embodiments, wherein the genetic element is a negative strand DNA.

[0117] 56. The synthetic curon of any of the preceding embodiments, wherein the genetic element comprises an episome.

[0118] 57. The synthetic curon of any of the preceding embodiments, wherein the synthetic curon has a lipid content of less than 10%, 5%, 2%, or 1% by weight, e.g., does not comprise a lipid bilayer.

[0119] 58. The synthetic curon of any of the preceding embodiments, wherein the synthetic curon is resistant to degradation by a detergent (e.g., a mild detergent, e.g., a biliary salt, e.g., sodium deoxycholate) relative to a viral particle comprising an external lipid bilayer, e.g., a retrovirus.

[0120] 59. The synthetic curon of embodiment 58, wherein at least about 50% (e.g., at least about 50%, 60%, 70%, 80%, 85%, 90%, 95%, 96%, 97%, 98%, 99%, 99.5%, or 99.9%) of the synthetic curon is not degraded after incubation the detergent (e.g., 0.5% by weight of the detergent) for 30 minutes at 37° C.

[0121] 60. The synthetic curon of any of the preceding embodiments, wherein the genetic element has at least 75% (e.g., at least 75, 76, 77, 78, 79, 80, 90, 91, 92, 93, 94, 95, 96, 97, 98, 99, or 100%) sequence identity to a wild-type Circoviridae sequence or a wild-type Anellovirus sequence, e.g., a wild-type Torque Teno virus (TTV), Torque Teno mini virus (TTMV), or TTMDV sequence, e.g., a sequence as listed in any of Tables 1, 3, 5, 7, 9, 11, or 13.

[0122] 61. The synthetic curon of embodiment 60, wherein the genetic element comprises a deletion of at least one element, e.g., an element as listed in any of Tables 1, 3, 5, 7, 9, 11, or 13, relative to a wild-type Anellovirus sequence, e.g., a wild-type TTV sequence or a wild-type TTMV sequence.

[0123] 62. The synthetic curon of embodiment 61, wherein the genetic element comprises a deletion comprising a nucleic acid sequence corresponding to nucleotides 3436-3607 of a TTV-tth8 sequence, e.g., the nucleic acid sequence shown in Table 5.

[0124] 63. The synthetic curon of embodiment 61, wherein the genetic element comprises a deletion comprising a nucleic acid sequence corresponding to nucleotides 574-1371 and/or nucleotides 1432-2210 of a TTMV-LY2 sequence, e.g., the nucleic acid sequence shown in Table 11.

[0125] 64. The synthetic curon of embodiment 61 or 62, wherein the genetic element comprises a deletion comprising a nucleic acid sequence corresponding to nucleotides 1372-1431 of a TTMV-LY2 sequence, e.g., the nucleic acid sequence shown in Table 11.

[0126] 65. The synthetic curon of embodiment 61, 63, or 64, wherein the genetic element comprises a deletion comprising a nucleic acid sequence corresponding to nucleotides 2610-2809 of a TTMV-LY2 sequence, e.g., the nucleic acid sequence shown in Table 11.

[0127] 66. The synthetic curon of any of the preceding embodiments, wherein the genetic element comprises at least 72 nucleotides (e.g., at least 73, 74, 75, etc. nt, optionally less than the full length of the genome) of a wild-type Anellovirus sequence, e.g., a wild-type Torque Teno virus (TTV), Torque Teno mini virus (TTMV), or TTMDV sequence, e.g., a sequence as listed in any of Tables 1, 3, 5, 7, 9, 11, or 13.

[0128] 67. The synthetic curon of any of the preceding embodiments, wherein the genetic element further comprises one or more of the following sequences: a sequence that encodes one or more miRNAs, a sequence that encodes one or more replication proteins, a sequence that encodes an exogenous gene, a sequence that encodes a therapeutic, a regulatory sequence (e.g., a promoter, enhancer), a sequence that encodes one or more regulatory sequences that targets endogenous genes (siRNA, lncRNAs, shRNA), a sequence that encodes a therapeutic mRNA or protein, and a sequence that encodes a cytolytic/cytotoxic RNA or protein.

[0129] 68. The synthetic curon of any of the preceding embodiments, wherein the synthetic curon further comprises a second genetic element, e.g., a second genetic element enclosed within the proteinaceous exterior.

[0130] 69. The synthetic curon of embodiment 68, wherein the second genetic element comprises a protein binding sequence, e.g., an exterior protein binding sequence, e.g., a packaging signal, e.g., a 5′ UTR conserved domain or GC-rich region, e.g., as described herein.

[0131] 70. The synthetic curon of any of the preceding embodiments, wherein the synthetic curon does not detectably infect bacterial cells, e.g., infects less than 1%, 0.5%, 0.1%, or 0.01% of bacterial cells.

[0132] 71. The synthetic curon of any of the preceding embodiments, wherein the synthetic curon is capable of infecting mammalian cells, e.g., human cells, e.g., immune cells, liver cells, epithelial cells, e.g., in vitro.

[0133] 72. The synthetic curon of any of the preceding embodiments, wherein the genetic element integrates at a frequency of less than 10%, 8%, 6%, 4%, 3%, 2%, 1%, 0.5%, 0.2%, 0.1% of the curons that enters the cell, e.g., wherein the synthetic curon is non-integrating.

[0134] 73. The synthetic curon of any of the preceding embodiments, wherein the genetic element is capable of replicating, e.g., capable of generating at least 10², 2×10², 5×10², 103, 2×10³, 5×10³, or 10⁴ genomic equivalents of the genetic element per cell, e.g., as measured by a quantitative PCR assay.

[0135] 74. The synthetic curon of any of the preceding embodiments, wherein the genetic element is capable of replicating, e.g., capable of generating at least 10², 2×10², 5×10², 10³, 2×10³, 5×10³, or 10⁴ more genomic equivalents of the genetic element in a cell, e.g., as measured by a quantitative PCR assay, than were present in the synthetic curon prior to delivery of the genetic element into the cell.

[0136] 75. The synthetic curon of any of the preceding embodiments, wherein the genetic element is not capable of replicating, e.g., wherein the genetic element is altered at a replication origin or lacks a replication origin.

[0137] 76. The synthetic curon of any of the preceding embodiments, wherein the genetic element is not capable of self-replicating, e.g., capable of being replicated without being integrated into a host cell genome.

[0138] 77. The synthetic curon of any of the preceding embodiments, wherein the synthetic curon is substantially non-pathogenic, e.g., does not induce a detectable deleterious symptom in a subject (e.g., elevated cell death or toxicity, e.g., relative to a subject not exposed to the curon).

[0139] 78. The synthetic curon of any of the preceding embodiments, wherein the synthetic curon is substantially non-immunogenic, e.g., does not induce a detectable and/or unwanted immune response, e.g., as detected according to the method described in Example 4.

[0140] 79. The synthetic curon of embodiment 78, wherein the substantially non-immunogenic curon has an efficacy in a subject that is a least about 10%, 20%, 30%, 40%, 50%, 60%, 70%, 80%, 90%, 95%, or 100% of the efficacy in a reference subject lacking an immune response.

[0141] 80. The synthetic curon of embodiment 78 or 79, wherein the immune response comprises one or more of an antibody specific to the curon; a cellular response (e.g., an immune effector cell (e.g., T cell- or NK cell) response) against the curon or cells comprising the curon; or macrophage engulfment of the curon or cells comprising the curon.

[0142] 81. The synthetic curon of any of the preceding embodiments, wherein the synthetic curon is less immunogenic than an AAV, elicits an immune response below that detected for a comparable quantity of AAV, e.g., as measured by an assay described herein, induces an antibody prevalence of less than 70% (e.g., less than about 60%, 50%, 40%, 30%, 20%, or 10% antibody prevalence) as measured by an assay described herein, or is substantially non-immunogenic.

[0143] 82. The synthetic curon of any of the preceding embodiments, wherein a population of at least 1000 of the synthetic curons is capable of delivering at least 100 copies of the genetic element into one or more of the eukaryotic cells.

[0144] 83. The synthetic curon of any of the preceding embodiments, wherein a population of the synthetic curons is capable of delivering the genetic element into at least 10%, 20%, 30%, 40%, 50%, 60%, 70%, 80%, 90%, 95%, 99%, or more of a population of the eukaryotic cells.

[0145] 84. The synthetic curon of any of the preceding embodiments, wherein a population of the synthetic curons is capable of delivering at least 1, 2, 5, 10, 20, 50, 100, 200, 500, 1000, 2000, 5000, 8,000, 1×10⁴, 1×10⁵, 1×10⁶, 1×10⁷ or greater copies of the genetic element per cell to a population of the eukaryotic cells.

[0146] 85. The synthetic curon of any of the preceding embodiments, wherein a population of the synthetic curons is capable of delivering 1×10⁴-1×10⁵, 1×10⁴-1×10⁶, 1×10⁴-1×10⁷, 1×10⁵-1×10⁶, 1×10⁵-1×10⁷, or 1×10⁶-1×10⁷ copies of the genetic element per cell to a population of the eukaryotic cells.

[0147] 86. The synthetic curon of any of the preceding embodiments, wherein the synthetic curon is present after at least two passages.

[0148] 87. The synthetic curon of any of the preceding embodiments, wherein the synthetic curon was produced by a process comprising at least two passages.

[0149] 88. The synthetic curon of any of the preceding embodiments, wherein the synthetic curon selectively delivers the exogenous effector to a desired cell type, tissue, or organ (e.g., photoreceptors in the retina, epithelial linings, or pancreas).

[0150] 89. The synthetic curon of any of the preceding embodiments, wherein the synthetic curon shows greater selectivity in vitro for an embryonic kidney cell line (e.g., HEK293T) than a lung epithelial carcinoma cell line (e.g., A549).

[0151] 90. The synthetic curon of any of the preceding embodiments, wherein the synthetic curon is present at higher levels in (e.g., preferentially accumulates in) a desired organ or tissue relative to other organs or tissues.

[0152] 91. The synthetic curon of embodiment 90, wherein the desired organ or tissue comprises bone marrow, blood, heart, GI, or skin.

[0153] 92. The synthetic curon of any of the preceding embodiments, wherein the eukaryotic cell is a mammalian cell, e.g., a human cell.

[0154] 93. The synthetic curon of any of the preceding embodiments, wherein the synthetic curon, or copies thereof, are detectable in a cell 24 hours (e.g., 1 day, 2 days, 3 days, 4 days, 5 days, 6 days, 1 week, 2 weeks, 3 weeks, 4 weeks, 30 days, or 1 month) after delivery into the cell.

[0155] 94. The synthetic curon of any of the preceding embodiments, wherein the synthetic curon is produced in the cell pellet and the supernatant at at least about 10⁸-fold (e.g., about 10⁵-fold, 10⁶-fold, 10⁷-fold, 10⁸-fold, 10⁹-fold, or 10¹⁰-fold) genomic equivalents/mL, e.g., relative to the quantity of the synthetic curon used to infect the cells, after 3-4 days post infection, e.g., using an infectivity assay, e.g., an assay according to Example 7.

[0156] 95. A composition comprising the synthetic curon of any of the preceding embodiments.

[0157] 96. A pharmaceutical composition comprising the synthetic curon of any of the preceding embodiments, and a pharmaceutically acceptable carrier or excipient.

[0158] 97. The composition or pharmaceutical composition of embodiment 95 or 96, which comprises at least 50%, 60%, 70%, 80%, 90%, 95%, 96%, 97%, 98%, 99%, or more curons, e.g., synthetic curons.

[0159] 98. The composition or pharmaceutical composition of any of embodiments 95-97, which comprises at least 10³, 10⁴, 10⁵, 10⁶, 10⁷, 10⁸, or 10⁹ synthetic curons.

[0160] 99. A pharmaceutical composition comprising
[0161] a) at least 10³, 10⁴, 10⁵, 10⁶, 10⁷, 10⁸, or 10⁹ curons (e.g., synthetic curons described herein) comprising:
   [0162] (i) a genetic element described herein, e.g., a genetic element comprising a promoter element, a nucleic acid sequence (e.g., a DNA sequence) encoding an exogenous effector, (e.g., a payload), and a protein binding sequence (e.g., an exterior protein binding sequence, e.g., a packaging signal), wherein the genetic element is a single-stranded DNA, and has one or both of the following properties: is circular and/or integrates into the genome of a eukaryotic cell at a frequency of less than about 0.001%, 0.005%, 0.01%, 0.05%, 0.1%, 0.5%, 1%, 1.5%, or 2% of the genetic element that enters the cell; and
   [0163] (ii) a proteinaceous exterior,
   [0164] wherein the genetic element is enclosed within the proteinaceous exterior; and
   [0165] wherein the synthetic curon is capable of delivering the genetic element into a eukaryotic cell;
[0166] b) a pharmaceutical excipient, and, optionally,
[0167] c) less than a pre-determined amount of: mycoplasma, endotoxin, host cell nucleic acids (e.g., host cell DNA and/or host cell RNA), animal-derived process impurities (e.g., serum albumin or trypsin), replication-competent agents (RCA), e.g., replication-competent virus or unwanted curons, free viral capsid protein, adventitious agents, and/or aggregates.

[0168] 100. A pharmaceutical composition comprising
[0169] a) at least 10³, 10⁴, 10⁵, 10⁶, 10⁷, 10⁸, or 10⁹ curons (e.g., synthetic curons described herein) comprising:
   [0170] (i) a genetic element described herein, e.g., a genetic element comprising a promoter element and a nucleic acid sequence (e.g., a DNA sequence) encoding an exogenous effector (e.g., a payload), and a protein binding sequence (e.g., an exterior protein binding sequence),
   [0171] wherein the genetic element has at least 75% (e.g., at least 75, 76, 77, 78, 79, 80, 90, 91, 92, 93, 94, 95, 96, 97, 98, 99, or 100%) sequence identity to a wild-type Anellovirus sequence (e.g., a wild-type Torque Teno virus (TTV), Torque Teno mini virus (TTMV), or TTMDV sequence, e.g., a wild-type Anellovirus sequence, e.g., as listed in any of Tables 1, 3, 5, 7, 9, 11, or 13); and
   [0172] (ii) a proteinaceous exterior;
   [0173] wherein the genetic element is enclosed within the proteinaceous exterior; and
   [0174] wherein the synthetic curon is capable of delivering the genetic element into a eukaryotic cell
[0175] b) a pharmaceutical excipient, and, optionally,
[0176] c) less than a pre-determined amount of: mycoplasma, endotoxin, host cell nucleic acids (e.g., host cell DNA and/or host cell RNA), animal-derived process impurities (e.g., serum albumin or trypsin), replication-competent agents (RCA), e.g., replication-competent virus or unwanted curons, free viral capsid protein, adventitious agents, and/or aggregates.

[0177] 101. The composition or pharmaceutical composition of any of embodiments 95-100, having one or more of the following characteristics:
[0178] a) the pharmaceutical composition meets a pharmaceutical or good manufacturing practices (GMP) standard;
[0179] b) the pharmaceutical composition was made according to good manufacturing practices (GMP);
[0180] c) the pharmaceutical composition has a pathogen level below a predetermined reference value, e.g., is substantially free of pathogens;
[0181] d) the pharmaceutical composition has a contaminant level below a predetermined reference value, e.g., is substantially free of contaminants;
[0182] e) the pharmaceutical composition has a predetermined level of non-infectious particles or a predetermined ratio of particles:infectious units (e.g., <300:1, ≤200:1, ≤100:1, or <50:1), or
[0183] f) the pharmaceutical composition has low immunogenicity or is substantially non-immunogenic, e.g., as described herein.

[0184] 102. The composition or pharmaceutical composition of any of embodiments 95-101, wherein the pharmaceutical composition has a contaminant level below a predetermined reference value, e.g., is substantially free of contaminants.

[0185] 103. The composition or pharmaceutical composition of embodiment 102, wherein the contaminant is selected from the group consisting of: mycoplasma, endotoxin, host cell nucleic acids (e.g., host cell DNA and/or host cell RNA), animal-derived process impurities (e.g., serum albumin or trypsin), replication-competent agents (RCA), e.g., replication-competent virus or unwanted curons (e.g., a curon other than the desired curon, e.g., a synthetic curon as described herein), free viral capsid protein, adventitious agents, and aggregates.

[0186] 104. The composition or pharmaceutical composition of embodiment 103, wherein the contaminant is host cell DNA and the threshold amount is about 500 ng of host cell DNA per dose of the pharmaceutical composition.

[0187] 105. The composition or pharmaceutical composition of any of embodiments 95-104, wherein the pharmaceutical composition comprises less than 10% (e.g., less than about 10%, 5%, 4%, 3%, 2%, 1%, 0.50%, or 0.10%) contaminant by weight.

[0188] 106. Use of the synthetic curon, composition, or pharmaceutical composition of any of the preceding embodiments for treating a disease or disorder in a subject.

[0189] 107. The use of embodiment 106, wherein the disease or disorder is chosen from an immune disorder, an interferonopathy (e.g., Type I interferonopathy), infectious disease, inflammatory disorder, autoimmune condition, cancer (e.g., a solid tumor, e.g., lung cancer), and a gastrointestinal disorder.

[0190] 108. The synthetic curon, composition, or pharmaceutical composition of any of the preceding embodiments for use in treating a disease or disorder in a subject.

[0191] 109. A method of treating a disease or disorder in a subject, the method comprising administering a synthetic curon of any of the preceding embodiments or the pharmaceutical composition of any of embodiments 95-105 to the subject.

[0192] 110. The method of embodiment 109, wherein the disease or disorder is chosen from an immune disorder, an interferonopathy (e.g., Type I interferonopathy), infectious disease, inflammatory disorder, autoimmune condition, cancer (e.g., a solid tumor, e.g., lung cancer), and a gastrointestinal disorder.

[0193] 111. A method of modulating, e.g., enhancing, a biological function in a subject, the method comprising administering a synthetic curon of any of the preceding embodiments or the pharmaceutical composition of any of embodiments 95-105 to the subject.

[0194] 112. A method of treating a disease or disorder in a subject, the method comprising administering to the subject a curon, e.g., synthetic curon, comprising:
[0195] (i) a genetic element comprising a promoter element and a sequence encoding an effector, e.g., a payload, and an exterior protein binding sequence;
[0196] wherein the genetic element is a single-stranded DNA, and wherein the genetic element is circular and/or integrates at a frequency of less than about 0.001%, 0.005%, 0.01%, 0.05%, 0.1%, 0.5%, 1%, 1.5%, or 2% of the genetic element that enters a cell; and
[0197] (ii) a proteinaceous exterior;
[0198] wherein the genetic element is enclosed within the proteinaceous exterior; and
[0199] wherein the curon, e.g., synthetic curon, is capable of delivering the genetic element into a eukaryotic cell.

[0200] 113. The method of embodiment 112, wherein the disease or disorder is chosen from an immune disorder, an interferonopathy (e.g., Type I interferonopathy), infectious disease, inflammatory disorder, autoimmune condition, cancer (e.g., a solid tumor, e.g., lung cancer), and a gastrointestinal disorder.

[0201] 114. The method of any of embodiments 109-113, wherein the effector is not an SV40-miR-S1, e.g., wherein the effector is a protein-encoding payload.

[0202] 115. The method of any of embodiments 109-114, wherein the curon does not comprise an exogenous effector.

[0203] 116. The method of any of embodiments 109-115, wherein the curon comprises a wild-type Circovirus or a wild-type Anellovirus, e.g., TTV or TTMV.

[0204] 117. The method of any of embodiments 109-116, wherein the administration of the curon, e.g., synthetic curon, results in delivery of the genetic element into at least 10%, 20%, 30%, 40%, 50%, 60%, 70%, 80%, 90%, 95%, 99%, or more of a population of target cells in the subject.

[0205] 118. The method of any of embodiments 109-117, wherein the administration of the curon, e.g., synthetic curon, results in delivery of the exogenous effector into at least 10%, 20%, 30%, 40%, 50%, 60%, 70%, 80%, 90%, 95%, 99%, or more of a population of target cells in the subject.

[0206] 119. The method of embodiment 117 or 118, wherein the target cells comprise mammalian cells, e.g., human cells, e.g., immune cells, liver cells, lung epithelial cells, e.g., in vitro.

[0207] 120. The method of any of embodiments 117-119, wherein the target cells are present in the liver or lung.

[0208] 121. The method of any of embodiments 117-120, wherein the target cells into which the genetic element is delivered each receive at least 10, 50, 100, 500, 1000, 10,000, 50,000, 100,000, or more copies of the genetic element.

[0209] 122. The method of any of embodiments 109-121, wherein the effector comprises a miRNA and wherein the miRNA reduces the level of a target protein or RNA in a cell or in a population of cells, e.g., into which the curon is delivered, e.g., by at least 10%, 20%, 30%, 40%, or 50%.

[0210] 123. A method of delivering a synthetic curon to a cell, comprising contacting the synthetic curon of any of the preceding embodiments with a cell, e.g., a eukaryotic cell, e.g., a mammalian cell.

[0211] 124. The method of embodiment 123, further comprising contacting a helper virus with the cell, wherein the helper virus comprises a polynucleotide, e.g., a polynucleotide encoding an exterior protein, e.g., an exterior protein capable of binding to the exterior protein binding sequence and, optionally, a lipid envelope.

[0212] 125. The method of embodiment 124, wherein the helper virus is contacted with the cell prior to, concurrently with, or after contacting the synthetic curon with the cell.

[0213] 126. The method of embodiment 123, further comprising contacting a helper polynucleotide with the cell.

[0214] 127. The method of embodiment 126, wherein the helper polynucleotide comprises a sequence polynucleotide encoding an exterior protein, e.g., an exterior protein capable of binding to the exterior protein binding sequence and a lipid envelope.

[0215] 128. The method of embodiment 126, wherein the helper polynucleotide is an RNA (e.g., mRNA), DNA, plasmid, viral polynucleotide, or any combination thereof.

[0216] 129. The method of any of embodiments 126-128, wherein the helper polynucleotide is contacted with the cell prior to, concurrently with, or after contacting the synthetic curon with the cell.

[0217] 130. The method of any of embodiments 123-129, further comprising contacting a helper protein with the cell.

[0218] 131. The method of embodiment 130, wherein the helper protein comprises a viral replication protein or a capsid protein.

[0219] 132. A host cell comprising the synthetic curon of any of the preceding embodiments.

[0220] 133. A nucleic acid molecule comprising a promoter element, a sequence encoding an effector (e.g., a payload), and an exterior protein binding sequence,
[0221] wherein the nucleic acid molecule is a single-stranded DNA, and wherein the nucleic acid molecule is circular and/or integrates at a frequency of less than about 0.001%, 0.005%, 0.01%, 0.05%, 0.1%, 0.5%, 1%, 1.5%, or 2% of the nucleic acid molecule that enters a cell;
[0222] wherein the effector does not originate from TTV and is not an SV40-miR-S1;
[0223] wherein the nucleic acid molecule does not comprise the polynucleotide sequence of TTMV-LY;
[0224] wherein the promoter element is capable of directing expression of the effector in a eukaryotic cell.

[0225] 134. A nucleic acid molecule comprising a promoter element and a nucleic acid sequence encoding an exogenous effector, and a protein binding sequence, wherein the genetic element comprises one or both of:
[0226] (a) a sequence having at least 85% sequence identity to the Anellovirus 5′ UTR conserved domain nucleotide sequence of nucleotides 323-393 of the nucleic acid sequence of Table 11, or
[0227] (b) a sequence having at least 85% sequence identity to the Anellovirus GC-rich region of nucleotides 2868-2929 of the nucleic acid sequence of Table 11.

[0228] 135. A nucleic acid molecule comprising a promoter element and a nucleic acid sequence encoding an exogenous effector, and a protein binding sequence, wherein the genetic element comprises one or both of:
[0229] (a) a sequence having at least 85% sequence identity to the Anellovirus 5′ UTR conserved domain of the nucleic acid sequence of Table 1, 3, 5, 7, 9 or 13; or
[0230] (b) a sequence having at least 85% sequence identity to the Anellovirus GC-rich region of the nucleic acid sequence of of Table 1, 3, 5, 7, 9 or 13.

[0231] 136. A genetic element comprising:
[0232] (i) a promoter element and a sequence encoding an effector, e.g., a payload, wherein the effector is exogenous relative to a wild-type Anellovirus sequence;
[0233] (ii) at least 72 contiguous nucleotides (e.g., at least 72, 73, 74, 75, 76, 77, 78, 79, 80, 90, 100, or 150 nucleotides) having at least 75% sequence identity to a wild-type Anellovirus sequence; or at least 100 contiguous nucleotides having at least 72% (e.g., at least 72, 73, 74, 75, 76, 77, 78, 79, 80, 90, 91, 92, 93, 94, 95, 96, 97, 98, 99, or 100%) sequence identity to a wild-type Anellovirus sequence; and
[0234] (iii) a protein binding sequence, e.g., an exterior protein binding sequence, and
[0235] wherein the nucleic acid construct is a single-stranded DNA; and
[0236] wherein the nucleic acid construct is circular and/or integrates at a frequency of less than about 0.001%, 0.005%, 0.01%, 0.05%, 0.1%, 0.5%, 1%, 1.5%, or 2% of the genetic element that enters a cell.

[0237] 137. A method of manufacturing a synthetic curon composition, comprising:
[0238] a) providing a host cell comprising one or more nucleic acid molecules encoding the components of a synthetic curon, e.g., a synthetic curon described herein, wherein the synthetic curon comprises a proteinaceous exterior and a genetic element, e.g., a genetic element comprising a promoter element, a sequence encoding an exogenous effector, (e.g., a payload), and a protein binding sequence (e.g., an exterior protein binding sequence, e.g., a packaging signal);
[0239] b) producing a synthetic curon from the host cell, thereby making a synthetic curon; and
[0240] c) formulating the synthetic curons, e.g., as a pharmaceutical composition suitable for administration to a subject.

[0241] 138. A method of manufacturing a synthetic curon composition, comprising:
[0242] a) providing a plurality of synthetic curons according to any of the preceding embodiments, or a composition or pharmaceutical composition of any of embodiments 95-105;
[0243] b) optionally evaluating the plurality for one or more of: a contaminant described herein, an optical density measurement (e.g., OD 260), particle number (e.g., by HPLC), infectivity (e.g., particle:infectious unit ratio); and
[0244] c) formulating the plurality of synthetic curons, e.g., as a pharmaceutical composition suitable for administration to a subject, e.g., if one or more of the paramaters of (b) meet a specified threshold.

[0245] 139. The method of embodiment 138, wherein the synthetic curon composition comprises at least 10⁵, 10⁶, 10⁷, 10⁸, 10⁹, 10¹⁰, 10¹¹, 10¹², 10¹³, 10¹⁴, or 10¹⁵ synthetic curons.

[0246] 140. The method of embodiment 138 or 139, wherein the synthetic curon composition comprises at least 10 ml, 20 ml, 50 ml, 100 ml, 200 ml, 500 ml, 1 L, 2 L, 5 L, 10 L, 20 L, or 50 L.

[0247] 141. A reaction mixture comprising the synthetic curon of any of the preceding embodiments and a helper virus, wherein the helper virus comprises a polynucleotide, e.g., a polynucleotide encoding an exterior protein, e.g., an exterior protein capable of binding to the exterior protein binding sequence and, optionally, a lipid envelope.

[0248] 142. A reaction mixture comprising the synthetic curon of any of the preceding embodiments and a second nucleic acid sequence encoding one or more of an amino acid sequence chosen from ORF2, ORF2/2, ORF2/3, ORF1, ORF1/1, or ORF1/2 of Table 12, or an amino acid sequence having at least 85% sequence identity thereto.

[0249] 143. A reaction mixture comprising the synthetic curon of any of the preceding embodiments and a second nucleic acid sequence encoding one or more of an amino acid sequence chosen from ORF2, ORF2/2, ORF2/3, ORF2t/3, ORF1, ORF1/1, or ORF1/2 of any of Tables 2, 4, 6, 8, 10, or 14, or an amino acid sequence having at least 85% sequence identity thereto.

[0250] 144. The reaction mixture of embodiment 142 or 143, wherein the second nucleic acid sequence is part of the genetic element.

[0251] 145. The reaction mixture of embodiment 144, wherein the second nucleic acid sequence is not part of the genetic element, e.g., the second nucleic acid sequence is comprised by a helper cell or helper virus.

[0252] 146. A synthetic curon comprising:
[0253] a genetic element comprising (i) a sequence encoding a non-pathogenic exterior protein, (ii) an exterior protein binding sequence that binds the genetic element to the non-pathogenic exterior protein, and (iii) a sequence encoding an effector, e.g., a regulatory nucleic acid; and
[0254] a proteinaceous exterior that is associated with, e.g., envelops or encloses, the genetic element.

[0255] 147. A pharmaceutical composition comprising
[0256] a) a curon comprising:
   [0257] a genetic element comprising (i) a sequence encoding a non-pathogenic exterior protein, (ii) an exterior protein binding sequence that binds the genetic element to the non-pathogenic exterior protein, and (iii) a sequence encoding an effector, e.g., a regulatory nucleic acid; and
   [0258] a proteinaceous exterior that is associated with, e.g., envelops or encloses, the genetic element; and
[0259] b) a pharmaceutical excipient.

[0260] 148. A pharmaceutical composition comprising
[0261] a) at least 10³, 10⁴, 10⁵, 10⁶, 10⁷, 10⁸, or 10⁹ curons (e.g., synthetic curons described herein) comprising:
   [0262] a genetic element comprising (i) a sequence encoding a non-pathogenic exterior protein, (ii) an exterior protein binding sequence that binds the genetic element to the non-pathogenic exterior protein, and (iii) a sequence encoding an effector, e.g., a regulatory nucleic acid; and
   [0263] a proteinaceous exterior that is associated with, e.g., envelops or encloses, the genetic element;
[0264] b) a pharmaceutical excipient, and, optionally,
[0265] c) less than a pre-determined amount of: mycoplasma, endotoxin, host cell nucleic acids (e.g., host cell DNA and/or host cell RNA), animal-derived process impurities (e.g., serum albumin or trypsin), replication-competent agents (RCA), e.g., replication-competent virus or unwanted curons, free viral capsid protein, adventitious agents, and/or aggregates.

[0266] 149. The curon or composition of any one of the previous embodiments, further comprising at least one of the following characteristics: the genetic element is a single-stranded DNA; the genetic element is circular; the curon is non-integrating; the curon has a sequence, structure, and/or function based on an anellovirus or other non-pathogenic virus, and the curon is non-pathogenic.

[0267] 150. The curon or composition of any one of the previous embodiments, wherein the proteinaceous exterior comprises the non-pathogenic exterior protein.

[0268] 151. The curon or composition of any one of the previous embodiments, wherein the proteinaceous exterior comprises one or more of the following: one or more glycosylated proteins, a hydrophilic DNA-binding region, an arginine-rich region, a threonine-rich region, a glutamine-rich region, a N-terminal polyarginine sequence, a variable region, a C-terminal polyglutamine/glutamate sequence, and one or more disulfide bridges.

[0269] 152. The curon or composition of any one of the previous embodiments, wherein the proteinaceous exterior comprises one or more of the following characteristics: an icosahedral symmetry, recognizes and/or binds a molecule that interacts with one or more host cell molecules to mediate entry into the host cell, lacks lipid molecules, lacks carbohydrates, is pH and temperature stable, is detergent resistant, and is non-immunogenic or non-pathogenic in a host.

[0270] 153. The curon or composition of any one of the previous embodiments, wherein the sequence encoding the non-pathogenic exterior protein comprise a sequence at least 70%, 80%, 85%, 90%, 95%, 96%, 97%, 98%, 99% identical to one or more sequences or a fragment thereof listed in Table 15.

[0271] 154. The curon or composition of any one of the previous embodiments, wherein the non-pathogenic exterior protein comprises a sequence at least 70%, 80%, 85%, 90%, 95%, 96%, 97%, 98%, 99% identical to one or more sequences or a fragment thereof listed in Table 16 or Table 17.

[0272] 155. The curon or composition of any one of the previous embodiments, wherein the non-pathogenic exterior protein comprises at least one functional domain that provides one or more functions, e.g., species and/or tissue and/or cell tropism, viral genome binding and/or packaging, immune evasion (non-immunogenicity and/or tolerance), pharmacokinetics, endocytosis and/or cell attachment, nuclear entry, intracellular modulation and localization, exocytosis modulation, propagation, and nucleic acid protection.

[0273] 156. The curon or composition of any one of the previous embodiments, wherein the effector comprises a regulatory nucleic acid, e.g., an miRNA, siRNA, mRNA, lncRNA, RNA, DNA, an antisense RNA, gRNA; a therapeutic, e.g., fluorescent tag or marker, antigen, peptide therapeutic, synthetic or analog peptide from naturally-bioactive peptide, agonist or antagonist peptide, anti-microbial peptide, pore-forming peptide, a bicyclic peptide, a targeting or cytotoxic peptide, a degradation or self-destruction peptide, and degradation or self-destruction peptides, small molecule, immune effector (e.g., influences susceptibility to an immune response/signal), a death protein (e.g., an inducer of apoptosis or necrosis), a non-lytic inhibitor of a tumor (e.g., an inhibitor of an oncoprotein), an epigenetic modifying agent, epigenetic enzyme, a transcription factor, a DNA or protein modification enzyme, a DNA-intercalating agent, an efflux pump inhibitor, a nuclear receptor activator or inhibitor, a proteasome inhibitor, a competitive inhibitor for an enzyme, a protein synthesis effector or inhibitor, a nuclease, a protein fragment or domain, a ligand or a receptor, and a CRISPR system or component.

[0274] 157. The curon or composition of any one of the previous embodiments, wherein the effector comprises a sequence at least 70%, 80%, 85%, 90%, 95%, 96%, 97%, 98%, 99% identical to one or more miRNA sequences listed in Table 18.

[0275] 158. The curon or composition of the previous embodiment, wherein the effector, e.g., miRNA, targets a host gene, e.g., modulates expression of the gene.

[0276] 159. The curon or composition of the previous embodiment, wherein the miRNA, e.g., has at least 70%, 80%, 85%, 90%, 95%, 96%, 97%, 98%, 99% identity to one or more sequences listed in Table 16.

[0277] 160. The curon or composition of any one of the previous embodiments, wherein the genetic element further comprises one or more of the following sequences: a sequence that encodes one or more miRNAs, a sequence that encodes one or more replication proteins, a sequence that encodes an exogenous gene, a sequence that encodes a therapeutic, a regulatory sequence (e.g., a promoter, enhancer), a sequence that encodes one or more regulatory sequences that targets endogenous genes (siRNA, lncRNAs, shRNA), a sequence that encodes a therapeutic mRNA or protein, and a sequence that encodes a cytolytic/cytotoxic RNA or protein.

[0278] 161. The curon or composition of any one of the previous embodiments, wherein the genetic element has one or more of the following characteristics: is non-integrating with a host cell's genome, is an episomal nucleic acid, is a single stranded DNA, is about 1 to 10 kb, exists within the nucleus of the cell, is capable of being bound by endogenous proteins, and produces a microRNA that targets host genes.

[0279] 162. The curon or composition of any one of the previous embodiments, wherein the genetic element comprises at least one viral sequence or at least 70%, 80%, 85%, 90%, 95%, 96%, 97%, 98%, 99% identity to one or more sequences or a fragment thereof listed in Table 19 or Table 20.

[0280] 163. The curon or composition of the previous embodiment, wherein the viral sequence is from at least one of a single stranded DNA virus (e.g., Anellovirus, Bidnavirus, Circovirus, Geminivirus, Genomovirus, Inovirus, Microvirus, Nanovirus, Parvovirus, and Spiravirus), a double stranded DNA virus (e.g., Adenovirus, Ampullavirus, Ascovirus, Asfarvirus, Baculovirus, Fusellovirus, Globulovirus, Guttavirus, Hytrosavirus, Herpesvirus, Iridovirus, Lipothrixvirus, Nimavirus, and Poxvirus), a RNA virus (e.g., Alphavirus, Furovirus, Hepatitis virus, Hordeivirus, Tobamovirus, Tobravirus, Tricornavirus, Rubivirus, Birnavirus, Cystovirus, Partitivirus, and Reovirus).

[0281] 164. The curon or composition of the previous embodiment, wherein the viral sequence is from one or more non-anelloviruses, e.g., adenovirus, herpes virus, pox virus, vaccinia virus, SV40, papilloma virus, an RNA virus such as a retrovirus, e.g., lenti virus, a single-stranded RNA virus, e.g., hepatitis virus, or a double-stranded RNA virus e.g., rotavirus.

[0282] 165. The curon or composition of any one of the previous embodiments, wherein the protein binding sequence interacts with the arginine-rich region of the proteinaceous exterior.

[0283] 166. The curon or composition of any one of the previous embodiments, wherein the curon is capable of replicating in a mammalian cell, e.g., human cell.

[0284] 167. The curon or composition of the previous embodiment, wherein the curon is non-pathogenic and/or non-integrating in a host cell.

[0285] 168. The curon or composition of any one of the previous embodiments, wherein the curon is non-immunogenic in a host.

[0286] 169. The curon or composition of any one of the previous embodiments, wherein the curon inhibits/enhances one or more viral properties, e.g., selectivity, e.g., infectivity, e.g., immunosuppression/activation, in a host or host cell.

[0287] 170. The curon or composition of the previous embodiment, wherein the curon is in an amount sufficient to modulate (e.g., phenotype, virus levels, gene expression, compete with other viruses, disease state, etc. at least about 5%, 10%, 15%, 20%, 25%, 30%, 35%, 40%, 45%, 50%, or more).

[0288] 171. The composition of any one of the previous embodiments further comprising at least one virus or vector comprising a genome of the virus, e.g., a variant of the curon, e.g., a commensal/native virus.

[0289] 172. The composition of any one of the previous embodiments further comprising a heterologous moiety, at least one small molecule, antibody, polypeptide, nucleic acid, targeting agent, imaging agent, nanoparticle, and a combination thereof.

[0290] 173. A vector comprising a genetic element comprising (i) a sequence encoding a non-pathogenic exterior protein, (ii) an exterior protein binding sequence that binds the genetic element to the non-pathogenic exterior protein, and (iii) a sequence encoding an effector, e.g., a regulatory nucleic acid.

[0291] 174. The vector of the previous embodiment, wherein the genetic element fails to integrate with a host cell's genome.

[0292] 175. The vector of any one of the previous embodiments, wherein the genetic element is capable of replicating in a mammalian cell, e.g., human cell.

[0293] 176. The vector of any one of the previous embodiments further comprising an exogenous nucleic acid sequence, e.g., selected to modulate expression of a gene, e.g., a human gene.

[0294] 177. A pharmaceutical composition comprising the vector of any one of the previous embodiments and a pharmaceutical excipient.

[0295] 178. The composition of the previous embodiment, wherein the vector is non-pathogenic and/or non-integrating in a host cell.

[0296] 179. The composition of any one of the previous embodiments, wherein the vector is non-immunogenic in a host.

[0297] 180. The composition of the previous embodiment, wherein the vector is in an amount sufficient to modulate (phenotype, virus levels, gene expression, compete with other viruses, disease state, etc. at least about 5%, 10%, 15%, 20%, 25%, 30%, 35%, 40%, 45%, 50%, or more).

[0298] 181. The composition of any one of the previous embodiments further comprising at least one virus or vector comprising a genome of the virus, e.g., a variant of the curon, a commensal/native virus, a helper virus, a non-anellovirus.

[0299] 182. The composition of any one of the previous embodiments further comprising a heterologous moiety, at least one small molecule, antibody, polypeptide, nucleic acid, targeting agent, imaging agent, nanoparticle, and a combination thereof.

[0300] 183. A method of producing, propagating, and harvesting the euron of any one of the previous embodiments.

[0301] 184. A method of designing and making the vector of any one of the previous embodiments.

[0302] 185. A method of administering to a subject an effective amount of the composition of any one of the previous embodiments.

[0303] 186. A method of identifying dysvirosis in a subject comprising:
[0304] analyzing genetic information from a sample obtained from a subject in need thereof, wherein viral genetic information is isolated from the subject's genetic information and other microorganisms;
[0305] comparing the viral genetic information to a reference, e.g., a control, a healthy subject; and
[0306] identifying dysvirosis in the subject if comparison of the viral genetic information yields an imbalance or irregular ratio of viral genetic information in the subject.

[0307] 187. A method of delivering a nucleic acid or protein payload to a target cell, tissue or subject, the method comprising contacting the target cell, tissue or subject with a nucleic acid composition that comprises (a) a first DNA sequence derived from a virus wherein the first DNA sequence is suffient to enable the production of a particle capable of infecting the target cell, tissue or subject and (a) a second DNA sequence encoding the nucleic acid or protein payload, the improvement comprising:
[0308] the first DNA sequence comprises at least 500 (at least 600, 700, 800, 900, 1000, 1200, 1400, 1500, 1600, 1800, 2000) nucleotides having at least 80% (at least 85%, 90%, 95%, 97%, 99%, 100%) sequence identity to a corresponding sequence listed in any of Tables 1, 3, 5, 7, 9, 11, or 13, or
[0309] the first DNA sequence encodes a sequence having at least 80% (at least 85%, 90%, 95%, 97%, 99%, 100%) sequence identity to an ORF listed in Table 2, 4, 6, 8, 10, 12, or 14, or
[0310] the first DNA sequence comprises a sequence having at least 90% (at least 95%, 97%, 99%, 100%) sequence identity to a consensus sequence listed in Table 14-1.

[0311] Other features, objects, and advantages of the invention will be apparent from the description and drawings, and from the claims.

[0312] Unless otherwise defined, all technical and scientific terms used herein have the same meaning as commonly understood by one of ordinary skill in the art to which this invention belongs. All publications, patent applications, patents, and other references mentioned herein are incorporated by reference in their entirety. In addition, the materials, methods, and examples are illustrative only and not intended to be limiting.

### BRIEF DESCRIPTION OF THE DRAWINGS

[0313] The following detailed description of the embodiments of the invention will be better understood when read in conjunction with the appended drawings. For the purpose of illustrating the invention, there are shown in the drawings embodiments, which are presently exemplified. It should be understood, however, that the invention is not limited to the precise arrangement and instrumentalities of the embodiments shown in the drawings.

[0314] FIG. 1A is an illustration showing percent sequence similarity of amino acid regions of capsid protein sequences.

[0315] FIG. 1B is an illustration showing percent sequence similarity of capsid protein sequences.

[0316] FIG. 2 is an illustration showing one embodiment of a curon.

[0317] FIG. 3 depicts a schematic of a kanamycin vector encoding the LY1 strain of TTMiniV (“Curon 1”).

[0318] FIG. 4 depicts a schematic of a kanamycin vector encoding the LY2 strain of TTMiniV (“Curon 2”).

[0319] FIG. 5 depicts transfection efficiency of synthetic curons in 293T and A549 cells.

[0320] FIGS. 6A and 6B depict quantitative PCR results that illustrate successful infection of 293T cells by synthetic curons.

[0321] FIGS. 7A and 7B depict quantitative PCR results that illustrate successful infection of A549 cells by synthetic curons.

[0322] FIGS. 8A and 8B depict quantitative PCR results that illustrate successful infection of Raji cells by synthetic curons.

[0323] FIGS. 9A and 9B depict quantitative PCR results that illustrate successful infection of Jurkat cells by synthetic curons.

[0324] FIGS. 10A and 10B depict quantitative PCR results that illustrate successful infection of Chang cells by synthetic curons.

[0325] FIGS. 11A-11B are a series of graphs showing luciferase expression from cells transfected or infected with TTMV-LY2Δ574-1371, Δ1432-2210,2610::nLuc. Luminescence was observed in infected cells, indicating successful replication and packaging.

[0326] FIG. 11C is a diagram depicting the phylogenetic tree of alphatorquevirus (Torque Teno Virus; TTV), with clades highlighted. At least 100 Anellovirus strains are represented, divided into five clades. Exemplary sequences from each of the five clades is provided herein, e.g., in Tables 1-14. Top box=clade 1; Top middle box=clade 2; Middle box=clade 3, Lower middle box=clade 4; Bottom box=clade 5.

[0327] FIG. 12 is a schematic showing an exemplary workflow for production of curons (e.g., replication-competent or replication-deficient curons as described herein).

[0328] FIG. 13 is a graph showing primer specificity for primer sets designed for quantification of TTV and TTMV genomic equivalents. Quantitative PCR based on SYBR green chemistry shows one distinct peak for each of the amplification products using TTMV or TTV specific primer sets, as indicated, on plasmids encoding the respective genomes.

[0329] FIG. 14 is a series of graphs showing PCR efficiencies in the quantification of TTV genome equivalents by qPCR. Increasing concentrations of primers and a fixed concentration of hydrolysis probe (250 nM) were used with two different commercial qPCR master mixes. Efficiencies of 90-110% resulted in minimal error propagation during quantification.

[0330] FIG. 15 is a graph showing an exemplary amplification plot for linear amplification of TTMV (Target 1) or TTV (Target 2) over a 7 log 10 of genome equivalent concentrations. Genome equivalents were quantified over 7 10-fold dilutions with high PCR efficiencies and linearity (R² TTMV: 0.996; R² TTV: 0.997).

[0331] FIGS. 16A-16B are a series of graphs showing quantification of TTMV genome equivalents in a curon stock. (A) Amplification plot of two stocks, each diluted 1:10 and run in duplicate. (B) The same two samples as shown in panel A, here shown in the context of the linear range. Shown are the upper and lower limits in the two representative samples. PCR Efficiency: 99.58%, R²: 0988.

[0332] FIGS. 17A and 17B are a series of graphs showing the functional effects of a synthetic curon comprising an exogenous miRNA, miR-625. (A) Impact on cell viability of non-small cell lung cancer (NSCLC) cells when infected with curons expressing miR-625 in three different NSCLC cell lines (A549 cells, NCI-H40 cells, and SW900 cells). (B) Impact of curons expressing miR-625 on expression of a YFP reporter by HEK293T cells.

[0333] FIG. 17C is a graph showing quantification of p65 immunoblot analysis normalized to total protein for SW900 cells, either contacted with the indicated curons or left untreated.

[0334] FIG. 18 is a diagram showing pairwise identity for alignments of viral DNA sequences within the five alphatorquevirus clades. DNA sequences for viruses from each TTV clade were aligned. Pairwise percent identity across a 50-bp sliding window is shown along the length of the alignments for each clade. Average pairwise identity is indicated.

[0335] FIG. 19 is a diagram showing pairwise identity for alignments of representative sequences from each alphatorquevirus clade. DNA sequences for TTV-CT30F, TTV-TJN02, TTV-tth8, TTV-JA20, and TTV-HD23a were aligned. Pairwise percent identity across a 50-bp sliding window is shown along the length of the alignment. Brackets above indicate non-coding and coding regions with pairwise identities are indicated. Brackets below indicate regions of high sequence conservation.

[0336] FIG. 20 is a diagram showing pairwise identity for amino acid alignments for putative proteins across the five alphatorquevirus clades. Amino acid sequences for putative proteins from TTV-CT30F, TTV-TJN02, TTV-tth8, TTV-JA20, and TTV-HD23a were aligned. Pairwise percent identity across a 50-aa sliding window is shown along the length of each alignment. Pairwise identity for both open reading frame DNA sequence and protein amino acid sequence is indicated.

[0337] FIG. 21 is a diagram showing that a domain within the 5′ UTR is highly conserved across the five alphatorquevirus clades. The 71-bp 5′UTR conserved domain sequences for each representative alphatorquevirus were aligned. The sequence has 96.6% pairwise identity between the five clades. The sequences shown in FIG. 21 (SEQ ID NOS 703-708, respectively, in order of appearance) are also listed, e.g., in Table 16-1 herein.

[0338] FIG. 22 is a diagram showing an alignment of the GC-rich domains from the five alphatorquevirus clades. Each anellovirus has a region downstream of the ORFs with greater than 70% GC content. Shown is an alignment of the GC-rich regions from TTV-CT30F, TTV-TJN02, TTV-tth8, TTV-JA20, and TTV-HD23a. The regions vary in length, but where they align, they show a 81.8% pairwise identity. The sequences shown in FIG. 22 (SEQ ID NOS 709-714, respectively, in order of appearance) are also listed, e.g., in Table 16-2 herein.

### DETAILED DESCRIPTION OF CERTAIN EMBODIMENTS

### Definitions

[0339] The wording “compound, composition, product, etc. for treating, modulating, etc.” is to be understood to refer a compound, composition, product, etc. per se which is suitable for the indicated purposes of treating, modulating, etc. The wording “compound, composition, product, etc. for treating, modulating, etc.” additionally discloses that, as an embodiment, such compound, composition, product, etc. is for use in treating, modulating, etc.

[0340] The wording “compound, composition, product, etc. for use in . . . ” or “use of a compound, composition, product, etc in the manufacture of a medicament, pharmaceutical composition, veterinary composition, diagnostic composition, etc. for . . . ” indicates that such compounds, compositions, products, etc. are to be used in therapeutic methods which may be practiced on the human or animal body. They are considered as an equivalent disclosure of embodiments and claims pertaining to methods of treatment, etc. If an embodiment or a claim thus refers to “a compound for use in treating a human or animal being suspected to suffer from a disease”, this is considered to be also a disclosure of a “use of a compound in the manufacture of a medicament for treating a human or animal being suspected to suffer from a disease” or a “method of treatment by administering a compound to a human or animal being suspected to suffer from a disease”. The wording “compound, composition, product, etc. for treating, modulating, etc.” is to be understood to refer a compound, composition, product, etc. per se which is suitable for the indicated purposes of treating, modulating, etc.

[0341] If hereinafter examples of a term, value, number, etc. are provided in parentheses, this is to be understood as an indication that the examples mentioned in the parentheses can constitute an embodiment. For example, if it stated that “in embodiments, the nucleic acid molecule comprises a nucleic acid sequence having at least about 70%, 75%, 80%, 85%, 90%, 95%, 96%, 97%, 98%, 99%, or 100% sequence identity to the Anellovirus ORF1 nucleotide sequence of Table 1 (e.g., nucleotides 571-2613 of the nucleic acid sequence of Table 1)”, then some embodiments relate to nucleic acid molecules comprising a nucleic acid sequence having at least about 70%, 75%, 80%, 85%, 90%, 95%, 96%, 97%, 98%, 99%, or 100% sequence identity to nucleotides 571-2613 of the nucleic acid sequence of Table 1.

[0342] As used herein, the term “curon” refers to a vehicle comprising a genetic element, e.g., an episome, e.g., circular DNA, enclosed in a proteinaceous exterior. A “synthetic curon,” as used herein, generally refers to a curon that is not naturally occurring, e.g., has a sequence that is modified relative to a wild-type virus (e.g., a wild-type Anellovirus as described herein). In some embodiments, the synthetic curon is engineered or recombinant, e.g., comprises a genetic element that comprises a modification relative to a wild-type viral genome (e.g., a wild-type Anellovirus genome as described herein). In some embodiments, enclosed within a proteinaceous exterior encompasses 100% coverage by a proteinaceous exterior, as well as less than 100% coverage, e.g., 95%, 90%, 85%, 80%, 70%, 60%, 50% or less. For example, gaps or discontinuities (e.g., that render the proteinaceous exterior permeable to water, ions, peptides, or small molecules) may be present in the proteinaceous exterior, so long as the genetic element is retained in the proteinaceous exterior, e.g., prior to entry into a host cell. In some embodiments, the curon is purified, e.g., it is separated from its original source and/or substantially free (>50%, >60%, >70%, >80%, >90%) of other components.

[0343] As used herein, a nucleic acid “encoding” refers to a nucleic acid sequence encoding an amino acid sequence or a functional polynucleotide (e.g., a non-coding RNA, e.g., an siRNA or miRNA).

[0344] As used herein, the term “dysvirosis” refers to a dysregulation of the virome in a subject.

[0345] An “exogenous” agent (e.g., an effector, a nucleic acid (e.g., RNA), a gene, payload, protein) as used herein refers to an agent that is either not comprised by, or not encoded by, a corresponding wild-type virus, e.g., an Anellovirus as described herein. In some embodiments, the exogenous agent does not naturally exist, such as a protein or nucleic acid that has a sequence that is altered (e.g., by insertion, deletion, or substitution) relative to a naturally occurring protein or nucleic acid. In some embodiments, the exogenous agent does not naturally exist in the host cell. In some embodiments, the exogenous agent exists naturally in the host cell but is exogenous to the virus. In some embodiments, the exogenous agent exists naturally in the host cell, but is not present at a desired level or at a desired time.

[0346] As used herein, the term “genetic element” refers to a nucleic acid sequence, generally in a curon. It is understood that the genetic element can be produced as naked DNA and optionally further assembled into a proteinaceous exterior. It is also understood that a curon can insert its genetic element into a cell, resulting in the genetic element being present in the cell and the proteinaceous exterior not necessarily entering the cell.

[0347] As used herein, a “substantially non-pathogenic” organism, particle, or component, refers to an organism, particle (e.g., a virus or a curon, e.g., as described herein), or component thereof that does not cause or induce a detectable disease or pathogenic condition, e.g., in a host organism, e.g., a mammal, e.g., a human. In some embodiments, administration of a curon to a subject can result in minor reactions or side effects that are acceptable as part of standard of care.

[0348] As used herein, the term “non-pathogenic” refers to an organism or component thereof that does not cause or induce a detectable disease or pathogenic condition, e.g., in a host organism, e.g., a mammal, e.g., a human.

[0349] As used herein, a “substantially non-integrating” genetic element refers to a genetic element, e.g., a genetic element in a virus or curon, e.g., as described herein, wherein less than about 0.01%, 0.05%, 0.1%, 0.5%, or 1% of the genetic element that enter into a host cell (e.g., a eukaryotic cell) or organism (e.g., a mammal, e.g., a human) integrate into the genome. In some embodiments the genetic element does not detectably integrate into the genome of, e.g., a host cell. In some embodiments, integration of the genetic element into the genome can be detected using techniques as described herein, e.g., nucleic acid sequencing, PCR detection and/or nucleic acid hybridization.

[0350] As used herein, a “substantially non-immunogenic” organism, particle, or component, refers to an organism, particle (e.g., a virus or curon, e.g., as described herein), or component thereof, that does not cause or induce an undesired or untargeted immune response, e.g., in a host tissue or organism (e.g., a mammal, e.g., a human). In embodiments, the substantially non-immunogenic organism, particle, or component does not produce a detectable immune response. In embodiments, the substantially non-immunogenic curon does not produce a detectable immune response against a protein comprising an amino acid sequence or encoded by a nucleic acid sequence shown in any of Tables 1-14. In embodiments, an immune response (e.g., an undesired or untargeted immune response) is detected by assaying antibody presence or level (e.g., presence or level of an anti-curon antibody, e.g., presence or level of an antibody against a synthetic curon as described herein) in a subject, e.g., according to the anti-TTV antibody detection method described in Tsuda et al. (1999; J. Virol. Methods 77: 199-206; incorporated herein by reference) and/or the method for determining anti-TTV IgG levels described in Kakkola et al. (2008; Virology 382: 182-189; incorporated herein by reference). Antibodies against an Anellovirus or a curon based thereon can also be detected by methods in the art for detecting anti-viral antibodies, e.g., methods of detecting anti-AAV antibodies, e.g., as described in Calcedo et al. (2013; Front. Immunol. 4(341): 1-7; incorporated herein by reference).

[0351] As used herein, the term “proteinaceous exterior” refers to an exterior component that is predominantly protein.

[0352] As used herein, the term “regulatory nucleic acid” refers to a nucleic acid sequence that modifies expression, e.g., transcription and/or translation, of a DNA sequence that encodes an expression product. In embodiments, the expression product comprises RNA or protein.

[0353] As used herein, the term “regulatory sequence” refers to a nucleic acid sequence that modifies transcription of a target gene product. In some embodiments, the regulatory sequence is a promoter or an enhancer.

[0354] As used herein, the term “replication protein” refers to a protein, e.g., a viral protein, that is utilized during infection, viral genome replication/expression, viral protein synthesis, and/or assembly of the viral components.

[0355] As used herein, “treatment”, “treating” and cognates thereof refer to the medical management of a subject with the intent to improve, ameliorate, stabilize, prevent or cure a disease, pathological condition, or disorder. This term includes active treatment (treatment directed to improve the disease, pathological condition, or disorder), causal treatment (treatment directed to the cause of the associated disease, pathological condition, or disorder), palliative treatment (treatment designed for the relief of symptoms), preventative treatment (treatment directed to preventing, minimizing or partially or completely inhibiting the development of the associated disease, pathological condition, or disorder); and supportive treatment (treatment employed to supplement another therapy).

[0356] As used herein, the term “virome” refers to viruses in a particular environment, e.g., a part of a body, e.g., in an organism, e.g. in a cell, e.g. in a tissue.

[0357] This invention relates generally to curons, e.g., synthetic curons, and uses thereof. The present disclosure provides synthetic curons, compositions comprising synthetic curons, and methods of making or using synthetic curons. Synthetic curons are generally useful as delivery vehicles, e.g., for delivering a therapeutic agent to a eukaryotic cell. Generally, a synthetic curon will include a genetic element comprising an exogenous nucleic acid sequence (e.g., encoding an exogenous effector) enclosed within a proteinaceous exterior. Synthetic curons can be used as a substantially non-immunogenic vehicle for delivering the genetic element, or an effector encoded therein (e.g., a polypeptide or nucleic acid effector, e.g., as described herein), into eukaryotic cells, e.g., to treat a disease or disorder in a subject comprising the cells.

### Curon

[0358] In some aspects, the invention described herein comprises compositions and methods of using and making a synthetic curon. In some embodiments, a curon comprises a genetic element (e.g., circular DNA, e.g., single stranded DNA), which comprise at least one exogenous element relative to the remainder of the genetic element and/or the proteinaceous exterior (e.g., an exogenous element encoding an effector, e.g., as described herein). A curon may be a delivery vehicle (e.g., a substantially non-pathogenic delivery vehicle) for a payload into a host, e.g., a human. In some embodiments, the curon is capable of replicating in a eukaryotic cell, e.g., a mammalian cell, e.g., a human cell. In some embodiments, the curon is substantially non-pathogenic and/or substantially non-integrating in the mammalian (e.g., human) cell. In some embodiments, the curon is substantially non-immunogenic in a mammal, e.g., a human. In some embodiments, the curon has a sequence, structure, and/or function that is based on an Anellovirus (e.g., an Anellovirus as described, e.g., an Anellovirus comprising a nucleic acid or polypeptide comprising a sequence as shown in any of Tables 1-14) or other substantially non-pathogenic virus, e.g., a symbiotic virus, commensal virus, native virus. Generally, an Anellovirus-based curon comprises at least one element exogenous to that Anellovirus, e.g., an exogenous effector or a nucleic acid sequence encoding an exogenous effector disposed within a genetic element of the curon. In some embodiments, the curon is replication-deficient. In some embodiments, the curon is replication-competent.

[0359] In an aspect, the invention includes a synthetic curon comprising (i) a genetic element comprising a promoter element, a sequence encoding an exogenous effector, (e.g., a payload), and a protein binding sequence (e.g., an exterior protein binding sequence, e.g., a packaging signal), wherein the genetic element is a single-stranded DNA, and has one or both of the following properties: is circular and/or integrates into the genome of a eukaryotic cell at a frequency of less than about 0.001%, 0.005%, 0.01%, 0.05%, 0.1%, 0.5%, 1%, 1.5%, or 2% of the genetic element that enters the cell; and (ii) a proteinaceous exterior; wherein the genetic element is enclosed within the proteinaceous exterior; and wherein the synthetic curon is capable of delivering the genetic element into a eukaryotic cell.

[0360] In some embodiments of the synthetic curon described herein, the genetic element integrates at a frequency of less than about 0.001%, 0.005%, 0.01%, 0.05%, 0.1%, 0.5%, 1%, 1.5%, or 2% of the genetic element that enters a cell. In some embodiments, less than about 0.01%, 0.05%, 0.1%, 0.5%, 1%, 2%, 3%, 4%, or 5% of the genetic elements from a plurality of the synthetic curons administered to a subject will integrate into the genome of one or more host cells in the subject. In some embodiments, the genetic elements of a population of synthetic curons, e.g., as described herein, integrate into the genome of a host cell at a frequency less than that of a comparable population of AAV viruses, e.g., at about a 50%, 60%, 70%, 75%, 80%, 85%, 90%, 95%, 100%, or more lower frequency than the comparable population of AAV viruses.

[0361] In an aspect, the invention includes a synthetic curon comprising: (i) a genetic element comprising a promoter element and a sequence encoding an exogenous effector (e.g., a payload), and a protein binding sequence (e.g., an exterior protein binding sequence), wherein the genetic element has at least 75% (e.g., at least 75, 76, 77, 78, 79, 80, 90, 91, 92, 93, 94, 95, 96, 97, 98, 99, or 100%) sequence identity to a wild-type Anellovirus sequence (e.g., a wild-type Torque Teno virus (TTV), Torque Teno mini virus (TTMV), or TTMDV sequence, e.g., a wild-type Anellovirus sequence as listed in any of Tables 1, 3, 5, 7, 9, 11, or 13); and (ii) a proteinaceous exterior; wherein the genetic element is enclosed within the proteinaceous exterior; and wherein the synthetic curon is capable of delivering the genetic element into a eukaryotic cell.

[0362] In one aspect, the invention includes a synthetic curon comprising:
[0363] a) a genetic element comprising (i) a sequence encoding a non-pathogenic exterior protein, (ii) an exterior protein binding sequence that binds the genetic element to the non-pathogenic exterior protein, and (iii) a sequence encoding a regulatory nucleic acid; and
[0364] b) a proteinaceous exterior that is associated with, e.g., envelops or encloses, the genetic element.

[0365] In some embodiments, the curon includes sequences or expression products from (or having >70%, 75%, 80%, 85%, 90%, 95%, 97%, 98%, 99%, 100% homology to) a non-enveloped, circular, single-stranded DNA virus. Animal circular single-stranded DNA viruses generally refer to a subgroup of single strand DNA (ssDNA) viruses, which infect eukaryotic non-plant hosts, and have a circular genome. Thus, animal circular ssDNA viruses are distinguishable from ssDNA viruses that infect prokaryotes (i.e. Microviridae and Inoviridae) and from ssDNA viruses that infect plants (i.e. Geminiviridae and Nanoviridae). They are also distinguishable from linear ssDNA viruses that infect non-plant eukaryotes (i.e. Parvoviridiae).

[0366] In some embodiments, the curon modulates a host cellular function, e.g., transiently or long term. In certain embodiments, the cellular function is stably altered, such as a modulation that persists for at least about 1 hr to about 30 days, or at least about 2 hrs, 6 hrs, 12 hrs, 18 hrs, 24 hrs, 2 days, 3, days, 4 days, 5 days, 6 days, 7 days, 8 days, 9 days, 10 days, 11 days, 12 days, 13 days, 14 days, 15 days, 16 days, 17 days, 18 days, 19 days, 20 days, 21 days, 22 days, 23 days, 24 days, 25 days, 26 days, 27 days, 28 days, 29 days, 30 days, 60 days, or longer or any time therebetween.

[0367] In certain embodiments, the cellular function is transiently altered, e.g., such as a modulation that persists for no more than about 30 mins to about 7 days, or no more than about 1 hr, 2 hrs, 3 hrs, 4 hrs, 5 hrs, 6 hrs, 7 hrs, 8 hrs, 9 hrs, 10 hrs, 11 hrs, 12 hrs, 13 hrs, 14 hrs, 15 hrs, 16 hrs, 17 hrs, 18 hrs, 19 hrs, 20 hrs, 21 hrs, 22 hrs, 24 hrs, 36 hrs, 48 hrs, 60 hrs, 72 hrs, 4 days, 5 days, 6 days, 7 days, or any time therebetween.

[0368] In some embodiments, the genetic element comprises a promoter element. In embodiments, the promoter element is selected from an RNA polymerase II-dependent promoter, an RNA polymerase III-dependent promoter, a PGK promoter, a CMV promoter, an EF-1α promoter, an SV40 promoter, a CAGG promoter, or a UBC promoter, TTV viral promoters, Tissue specific, U6 (pollIII), minimal CMV promoter with upstream DNA binding sites for activator proteins (TetR-VP16, Gal4-VP16, dCas9-VP16, etc). In embodiments, the promoter element comprises a TATA box. In embodiments, the promoter element is endogenous to a wild-type Anellovirus, e.g., as described herein.

[0369] In some embodiments, the genetic element comprises one or more of the following characteristics: single-stranded, circular, negative strand, and/or DNA. In embodiments, the genetic element comprises an episome. In some embodiments, the portions of the genetic element excluding the effector have a combined size of about 2.5-5 kb (e.g., about 2.8-4 kb, about 2.8-3.2 kb, about 3.6-3.9 kb, or about 2.8-2.9 kb), less than about 5 kb (e.g., less than about 2.9 kb, 3.2 kb, 3.6 kb, 3.9 kb, or 4 kb), or at least 100 nucleotides (e.g., at least 1 kb).

[0370] The curons, compositions comprising curons, methods using such curons, etc., as described herein are, in some instances, based in part on the examples which illustrate how different effectors, for example miRNAs (e.g. against IFN or miR-625), shRNA, etc and protein binding sequences, for example DNA sequences that bind to capsid protein such as Q99153, are combined with proteinaceious exteriors, for example a capsid disclosed in Arch Virol (2007) 152: 1961-1975, to produce curons which can then be used to deliver an exogenous effector to cells (e.g., animal cells, e.g., human cells or non-human animal cells such as pig or mouse cells). In embodiments, the exogenous effector can silence expression of a factor such as an interferon. The examples further describe how curons can be made by inserting exogenous effectors into sequences derived, e.g., from Anellovirus. It is on the basis of these examples that the description hereinafter contemplates various variations of the specific findings and combinations considered in the examples. For example, the skilled person will understand from the examples that the specific miRNAs are used just as an example of an exogenous effector and that other exogenous effectors may be, e.g., other regulatory nucleic acids or therapeutic peptides. Similarly, the specific capsids used in the examples may be replaced by substantially non-pathogenic proteins described hereinafter. The specifc Anellovirus sequences described in the examples may also be replaced by the Anellovirus sequences described hereinafter. These considerations similarly apply to protein binding sequences, regulatory sequences such as promoters, and the like. Independent thereof, the person skilled in the art will in particular consider such embodiments which are closely related to the examples.

[0371] In some embodiments, a curon, or the genetic element comprised in the curon, is introduced into a cell (e.g., a human cell). In some embodiments, the exogenous effector (e.g., an RNA, e.g., an miRNA), e.g., encoded by the genetic element of a curon, is expressed in a cell (e.g., a human cell), e.g., once the curon or the genetic element has been introduced into the cell, e.g., as described in Example 19. In embodiments, introduction of the curon, or genetic element comprised therein, into a cell modulates (e.g., increases or decreases) the level of a target molecule (e.g., a target nucleic acid, e.g., RNA, or a target polypeptide) in the cell, e.g., by altering the expression level of the target molecule by the cell (e.g., as described in Example 22). In embodiments, introduction of the curon, or genetic element comprised therein, decreases level of interferon produced by the cell, e.g., as described in Examples 3 and 4. In embodiments, introduction of the curon, or genetic element comprised therein, into a cell modulates (e.g., increases or decreases) a function of the cell. In embodiments, introduction of the curon, or genetic element comprised therein, into a cell modulates (e.g., increases or decreases) the viability of the cell. In embodiments, introduction of the curon, or genetic element comprised therein, into a cell decreases viability of a cell (e.g., a cancer cell), e.g., as described in Example 22.

[0372] In some embodiments, a curon (e.g., a synthetic curon) described herein induces an antibody prevalence of less than 70% (e.g., less than about 60%, 50%, 40%, 30%, 20%, or 10% antibody prevalence). In embodiments, antibody prevalence is determined according to methods known in the art. In embodiments, antibody prevalence is determined by detecting antibodies against an Anellovirus (e.g., as described herein), or a curon based thereon, in a biological sample, e.g., according to the anti-TTV antibody detection method described in Tsuda et al. (1999; J. Virol. Methods 77: 199-206; incorporated herein by reference) and/or the method for determining anti-TTV IgG seroprevalence described in Kakkola et al. (2008; Virology 382: 182-189; incorporated herein by reference). Antibodies against an Anellovirus or a curon based thereon can also be detected by methods in the art for detecting anti-viral antibodies, e.g., methods of detecting anti-AAV antibodies, e.g., as described in Calcedo et al. (2013; Front. Immunol. 4(341): 1-7; incorporated herein by reference).

### Anelloviruses

[0373] In some embodiments, a synthetic curon, e.g., as described herein, comprises sequences or expression products derived from an Anellovirus. Generally, a synthetic curon includes one or more sequences or expression products that are exogenous relative to the Anellovirus. The Anellovirus genus was once classified as a clade within the Circoviridae family, and has more recently been classified as a separate family. Anelloviruses generally have single-stranded circular DNA genomes with negative polarity. Anellovirus has not been linked to any human disease. However, attempts to link Anellovirus infection with human disease are confounded by the high incidence of asymptomatic Anellovirus viremia in control cohort population(s), the remarkable genomic diversity within the anellovirus viral family, the historical inability to propagate the agent in vitro, and the lack of animal model(s) of Anellovirus disease (Yzebe et al., Panminerva Med. (2002) 44:167-177; Biagini, P., Vet. Microbiol. (2004) 98:95-101).

[0374] Anellovirus appears to be transmitted by oronasal or fecal-oral infection, mother-to-infant and/or in utero transmission (Gerner et al., Ped. Infect. Dis. J. (2000) 19:1074-1077). Infected persons are characterized by a prolonged (months to years) Anellovirus viremia. Humans may be co-infected with more than one genogroup or strain (Saback, et al., Scad. J. Infect. Dis. (2001) 33:121-125). There is a suggestion that these genogroups can recombine within infected humans (Rey et al., Infect. (2003) 31:226-233). The double stranded isoform (replicative) intermediates have been found in several tissues, such as liver, peripheral blood mononuclear cells and bone marrow (Kikuchi et al., J. Med. Virol. (2000) 61:165-170; Okamoto et al., Biochem. Biophys. Res. Commun. (2002) 270:657-662; Rodriguez-lnigo et al., Am. J. Pathol. (2000) 156:1227-1234).

[0375] In some embodiments, a curon as described herein comprises one or more nucleic acid molecules (e.g., a genetic element as described herein) comprising a sequence having at least about 70%, 75%, 80%, 85%, 90%, 95%, 96%, 97%, 98%, 99%, or 100% sequence identity to an Anellovirus sequence, e.g., as described herein, or a fragment thereof. In embodiments, the Anellovirus sequence is selected from a sequence as shown in any of Tables 1, 3, 5, 7, 9, 11, or 13. In some embodiments, a curon as described herein comprises one or more nucleic acid molecules (e.g., a genetic element as described herein) comprising a sequence having at least about 70%, 75%, 80%, 85%, 90%, 95%, 96%, 97%, 98%, 99%, or 100% sequence identity to a TATA box, cap site, transcriptional start site, 5′ UTR conserved domain, ORF1, ORF1/1, ORF1/2, ORF2, ORF2/2, ORF2/3, ORF2t/3, three open-reading frame region, poly(A) signal, GC-rich region, or any combination thereof, of any of the Anelloviruses described herein (e.g., an Anellovirus sequence as annotated, or as encoded by a sequence listed, in any of Tables 1-16 or 19). In some embodiments, the nucleic acid molecule comprises a sequence encoding a capsid protein, e.g., an ORF1, ORF1/1, ORF1/2, ORF2, ORF2/2, ORF2/3, ORF2t/3 sequence of any of the Anelloviruses described herein (e.g., an Anellovirus sequence as annotated, or as encoded by a sequence listed, in any of Tables 1-16 or 19). In embodiments, the nucleic acid molecule comprises a sequence encoding a capsid protein comprising an amino acid sequence having at least about 70%, 75%, 80%, 85%, 90%, 95%, 96%, 97%, 98%, 99%, or 100% sequence identity to an Anellovirus ORF1 or ORF2 protein (e.g., an ORF1 or ORF2 amino acid sequence as shown in any of Tables 2, 4, 6, 8, 10, 12, 14, or 16, or an ORF1 or ORF2 amino acid sequence encoded by a nucleic acid sequence as shown in any of Tables 1, 3, 5, 7, 9, 11, 13, 15, or 19).

[0376] In embodiments, the nucleic acid molecule comprises a nucleic acid sequence having at least about 70%, 75%, 80%, 85%, 90%, 95%, 96%, 97%, 98%, 99%, or 100% sequence identity to the Anellovirus ORF1 nucleotide sequence of Table 1 (e.g., nucleotides 571-2613 of the nucleic acid sequence of Table 1). In embodiments, the nucleic acid molecule comprises a nucleic acid sequence having at least about 70%, 75%, 80%, 85%, 90%, 95%, 96%, 97%, 98%, 99%, or 100% sequence identity to the Anellovirus ORF1/1 nucleotide sequence of Table 1 (e.g., nucleotides 571-587 and/or 2137-2613 of the nucleic acid sequence of Table 1). In embodiments, the nucleic acid molecule comprises a nucleic acid sequence having at least about 70%, 75%, 80%, 85%, 90%, 95%, 96%, 97%, 98%, 99%, or 100% sequence identity to the Anellovirus ORF1/2 nucleotide sequence of Table 1 (e.g., nucleotides 571-687 and/or 2339-2659 of the nucleic acid sequence of Table 1). In embodiments, the nucleic acid molecule comprises a nucleic acid sequence having at least about 70%, 75%, 80%, 85%, 90%, 95%, 96%, 97%, 98%, 99%, or 100% sequence identity to the Anellovirus ORF2 nucleotide sequence of Table 1 (e.g., nucleotides 299-691 of the nucleic acid sequence of Table 1). In embodiments, the nucleic acid molecule comprises a nucleic acid sequence having at least about 70%, 75%, 80%, 85%, 90%, 95%, 96%, 97%, 98%, 99%, or 100% sequence identity to the Anellovirus ORF2/2 nucleotide sequence of Table 1 (e.g., nucleotides 299-687 and/or 2137-2659 of the nucleic acid sequence of Table 1). In embodiments, the nucleic acid molecule comprises a nucleic acid sequence having at least about 70%, 75%, 80%, 85%, 90%, 95%, 96%, 97%, 98%, 99%, or 100% sequence identity to the Anellovirus ORF2/3 nucleotide sequence of Table 1 (e.g., nucleotides 299-687 and/or 2339-2831 of the nucleic acid sequence of Table 1). In embodiments, the nucleic acid molecule comprises a nucleic acid sequence having at least about 70%, 75%, 80%, 85%, 90%, 95%, 96%, 97%, 98%, 99%, or 100% sequence identity to the Anellovirus ORF2t/3 nucleotide sequence of Table 1 (e.g., nucleotides 299-348 and/or 2339-2831 of the nucleic acid sequence of Table 1). In embodiments, the nucleic acid molecule comprises a nucleic acid sequence having at least about 70%, 75%, 80%, 85%, 90%, 95%, 96%, 97%, 98%, 99%, or 100% sequence identity to the Anellovirus TATA box nucleotide sequence of Table 1 (e.g., nucleotides 84-90 of the nucleic acid sequence of Table 1). In embodiments, the nucleic acid molecule comprises a nucleic acid sequence having at least about 70%, 75%, 80%, 85%, 90%, 95%, 96%, 97%, 98%, 99%, or 100% sequence identity to the Anellovirus Cap site nucleotide sequence of Table 1 (e.g., nucleotides 107-114 of the nucleic acid sequence of Table 1). In embodiments, the nucleic acid molecule comprises a nucleic acid sequence having at least about 70%, 75%, 80%, 85%, 90%, 95%, 96%, 97%, 98%, 99%, or 100% sequence identity to the Anellovirus transcriptional start site nucleotide sequence of Table 1 (e.g., nucleotide 114 of the nucleic acid sequence of Table 1). In embodiments, the nucleic acid molecule comprises a nucleic acid sequence having at least about 70%, 75%, 80%, 85%, 90%, 95%, 96%, 97%, 98%, 99%, or 100% sequence identity to the Anellovirus 5′ UTR conserved domain nucleotide sequence of Table 1 (e.g., nucleotides 177-247 of the nucleic acid sequence of Table 1). In embodiments, the nucleic acid molecule comprises a nucleic acid sequence having at least about 70%, 75%, 80%, 85%, 90%, 95%, 96%, 97%, 98%, 99%, or 100% sequence identity to the Anellovirus three open-reading frame region nucleotide sequence of Table 1 (e.g., nucleotides 2325-2610 of the nucleic acid sequence of Table 1). In embodiments, the nucleic acid molecule comprises a nucleic acid sequence having at least about 70%, 75%, 80%, 85%, 90%, 95%, 96%, 97%, 98%, 99%, or 100% sequence identity to the Anellovirus poly(A) signal nucleotide sequence of Table 1 (e.g., nucleotides 2813-2818 of the nucleic acid sequence of Table 1). In embodiments, the nucleic acid molecule comprises a nucleic acid sequence having at least about 70%, 75%, 80%, 85%, 90%, 95%, 96%, 97%, 98%, 99%, or 100% sequence identity to the Anellovirus GC-rich nucleotide sequence of Table 1 (e.g., nucleotides 3415-3570 of the nucleic acid sequence of Table 1).

[0377] In embodiments, the nucleic acid molecule comprises a nucleic acid sequence having at least about 70%, 75%, 80%, 85%, 90%, 95%, 96%, 97%, 98%, 99%, or 100% sequence identity to the Anellovirus ORF1 nucleotide sequence of Table 3 (e.g., nucleotides 599-2839 of the nucleic acid sequence of Table 3). In embodiments, the nucleic acid molecule comprises a nucleic acid sequence having at least about 70%, 75%, 80%, 85%, 90%, 95%, 96%, 97%, 98%, 99%, or 100% sequence identity to the Anellovirus ORF1/1 nucleotide sequence of Table 3 (e.g., nucleotides 599-727 and/or 2381-2839 of the nucleic acid sequence of Table 3). In embodiments, the nucleic acid molecule comprises a nucleic acid sequence having at least about 70%, 75%, 80%, 85%, 90%, 95%, 96%, 97%, 98%, 99%, or 100% sequence identity to the Anellovirus ORF1/2 nucleotide sequence of Table 3 (e.g., nucleotides 599-727 and/or 2619-2813 of the nucleic acid sequence of Table 3). In embodiments, the nucleic acid molecule comprises a nucleic acid sequence having at least about 70%, 75%, 80%, 85%, 90%, 95%, 96%, 97%, 98%, 99%, or 100% sequence identity to the Anellovirus ORF2 nucleotide sequence of Table 3 (e.g., nucleotides 357-731 of the nucleic acid sequence of Table 3). In embodiments, the nucleic acid molecule comprises a nucleic acid sequence having at least about 70%, 75%, 80%, 85%, 90%, 95%, 96%, 97%, 98%, 99%, or 100% sequence identity to the Anellovirus ORF2/2 nucleotide sequence of Table 3 (e.g., nucleotides 357-727 and/or 2381-2813 of the nucleic acid sequence of Table 3). In embodiments, the nucleic acid molecule comprises a nucleic acid sequence having at least about 70%, 75%, 80%, 85%, 90%, 95%, 96%, 97%, 98%, 99%, or 100% sequence identity to the Anellovirus ORF2/3 nucleotide sequence of Table 3 (e.g., nucleotides 357-727 and/or 2619-3021 of the nucleic acid sequence of Table 3). In embodiments, the nucleic acid molecule comprises a nucleic acid sequence having at least about 70%, 75%, 80%, 85%, 90%, 95%, 96%, 97%, 98%, 99%, or 100% sequence identity to the Anellovirus ORF2t/3 nucleotide sequence of Table 3 (e.g., nucleotides 357-406 and/or 2619-3021 of the nucleic acid sequence of Table 3). In embodiments, the nucleic acid molecule comprises a nucleic acid sequence having at least about 70%, 75%, 80%, 85%, 90%, 95%, 96%, 97%, 98%, 99%, or 100% sequence identity to the Anellovirus TATA box nucleotide sequence of Table 3 (e.g., nucleotides 89-90 of the nucleic acid sequence of Table 3). In embodiments, the nucleic acid molecule comprises a nucleic acid sequence having at least about 70%, 75%, 80%, 85%, 90%, 95%, 96%, 97%, 98%, 99%, or 100% sequence identity to the Anellovirus Cap site nucleotide sequence of Table 3 (e.g., nucleotides 107-114 of the nucleic acid sequence of Table 3). In embodiments, the nucleic acid molecule comprises a nucleic acid sequence having at least about 70%, 75%, 80%, 85%, 90%, 95%, 96%, 97%, 98%, 99%, or 100% sequence identity to the Anellovirus transcriptional start site nucleotide sequence of Table 3 (e.g., nucleotide 114 of the nucleic acid sequence of Table 3). In embodiments, the nucleic acid molecule comprises a nucleic acid sequence having at least about 70%, 75%, 80%, 85%, 90%, 95%, 96%, 97%, 98%, 99%, or 100% sequence identity to the Anellovirus 5′ UTR conserved domain nucleotide sequence of Table 3 (e.g., nucleotides 174-244 of the nucleic acid sequence of Table 3). In embodiments, the nucleic acid molecule comprises a nucleic acid sequence having at least about 70%, 75%, 80%, 85%, 90%, 95%, 96%, 97%, 98%, 99%, or 100% sequence identity to the Anellovirus three open-reading frame region nucleotide sequence of Table 3 (e.g., nucleotides 2596-2810 of the nucleic acid sequence of Table 3). In embodiments, the nucleic acid molecule comprises a nucleic acid sequence having at least about 70%, 75%, 80%, 85%, 90%, 95%, 96%, 97%, 98%, 99%, or 100% sequence identity to the Anellovirus poly(A) signal nucleotide sequence of Table 3 (e.g., nucleotides 3017-3022 of the nucleic acid sequence of Table 3). In embodiments, the nucleic acid molecule comprises a nucleic acid sequence having at least about 70%, 75%, 80%, 85%, 90%, 95%, 96%, 97%, 98%, 99%, or 100% sequence identity to the Anellovirus GC-rich nucleotide sequence of Table 3 (e.g., nucleotides 3691-3794 of the nucleic acid sequence of Table 3).

[0378] In embodiments, the nucleic acid molecule comprises a nucleic acid sequence having at least about 70%, 75%, 80%, 85%, 90%, 95%, 96%, 97%, 98%, 99%, or 100% sequence identity to the Anellovirus ORF1 nucleotide sequence of Table 5 (e.g., nucleotides 599-2830 of the nucleic acid sequence of Table 5). In embodiments, the nucleic acid molecule comprises a nucleic acid sequence having at least about 70%, 75%, 80%, 85%, 90%, 95%, 96%, 97%, 98%, 99%, or 100% sequence identity to the Anellovirus ORF1/1 nucleotide sequence of Table 5 (e.g., nucleotides 599-715 and/or 2363-2830 of the nucleic acid sequence of Table 5). In embodiments, the nucleic acid molecule comprises a nucleic acid sequence having at least about 70%, 75%, 80%, 85%, 90%, 95%, 96%, 97%, 98%, 99%, or 100% sequence identity to the Anellovirus ORF1/2 nucleotide sequence of Table 5 (e.g., nucleotides 599-715 and/or 2565-2789 of the nucleic acid sequence of Table 5). In embodiments, the nucleic acid molecule comprises a nucleic acid sequence having at least about 70%, 75%, 80%, 85%, 90%, 95%, 96%, 97%, 98%, 99%, or 100% sequence identity to the Anellovirus ORF2 nucleotide sequence of Table 5 (e.g., nucleotides 336-719 of the nucleic acid sequence of Table 5). In embodiments, the nucleic acid molecule comprises a nucleic acid sequence having at least about 70%, 75%, 80%, 85%, 90%, 95%, 96%, 97%, 98%, 99%, or 100% sequence identity to the Anellovirus ORF2/2 nucleotide sequence of Table 5 (e.g., nucleotides 336-715 and/or 2363-2789 of the nucleic acid sequence of Table 5). In embodiments, the nucleic acid molecule comprises a nucleic acid sequence having at least about 70%, 75%, 80%, 85%, 90%, 95%, 96%, 97%, 98%, 99%, or 100% sequence identity to the Anellovirus ORF2/3 nucleotide sequence of Table 5 (e.g., nucleotides 336-715 and/or 2565-3015 of the nucleic acid sequence of Table 5). In embodiments, the nucleic acid molecule comprises a nucleic acid sequence having at least about 70%, 75%, 80%, 85%, 90%, 95%, 96%, 97%, 98%, 99%, or 100% sequence identity to the Anellovirus ORF2t/3 nucleotide sequence of Table 5 (e.g., nucleotides 336-388 and/or 2565-3015 of the nucleic acid sequence of Table 5). In embodiments, the nucleic acid molecule comprises a nucleic acid sequence having at least about 70%, 75%, 80%, 85%, 90%, 95%, 96%, 97%, 98%, 99%, or 100% sequence identity to the Anellovirus TATA box nucleotide sequence of Table 5 (e.g., nucleotides 83-88 of the nucleic acid sequence of Table 5). In embodiments, the nucleic acid molecule comprises a nucleic acid sequence having at least about 70%, 75%, 80%, 85%, 90%, 95%, 96%, 97%, 98%, 99%, or 100% sequence identity to the Anellovirus Cap site nucleotide sequence of Table 5 (e.g., nucleotides 104-111 of the nucleic acid sequence of Table 5). In embodiments, the nucleic acid molecule comprises a nucleic acid sequence having at least about 70%, 75%, 80%, 85%, 90%, 95%, 96%, 97%, 98%, 99%, or 100% sequence identity to the Anellovirus transcriptional start site nucleotide sequence of Table 5 (e.g., nucleotide 111 of the nucleic acid sequence of Table 5). In embodiments, the nucleic acid molecule comprises a nucleic acid sequence having at least about 70%, 75%, 80%, 85%, 90%, 95%, 96%, 97%, 98%, 99%, or 100% sequence identity to the Anellovirus 5′ UTR conserved domain nucleotide sequence of Table 5 (e.g., nucleotides 170-240 of the nucleic acid sequence of Table 5). In embodiments, the nucleic acid molecule comprises a nucleic acid sequence having at least about 70%, 75%, 80%, 85%, 90%, 95%, 96%, 97%, 98%, 99%, or 100% sequence identity to the Anellovirus three open-reading frame region nucleotide sequence of Table 5 (e.g., nucleotides 2551-2786 of the nucleic acid sequence of Table 5). In embodiments, the nucleic acid molecule comprises a nucleic acid sequence having at least about 70%, 75%, 80%, 85%, 90%, 95%, 96%, 97%, 98%, 99%, or 100% sequence identity to the Anellovirus poly(A) signal nucleotide sequence of Table 5 (e.g., nucleotides 3011-3016 of the nucleic acid sequence of Table 5). In embodiments, the nucleic acid molecule comprises a nucleic acid sequence having at least about 70%, 75%, 80%, 85%, 90%, 95%, 96%, 97%, 98%, 99%, or 100% sequence identity to the Anellovirus GC-rich nucleotide sequence of Table 5 (e.g., nucleotides 3632-3753 of the nucleic acid sequence of Table 5).

[0379] In embodiments, the nucleic acid molecule comprises a nucleic acid sequence having at least about 70%, 75%, 80%, 85%, 90%, 95%, 96%, 97%, 98%, 99%, or 100% sequence identity to the Anellovirus ORF1 nucleotide sequence of Table 7 (e.g., nucleotides 590-2899 of the nucleic acid sequence of Table 7). In embodiments, the nucleic acid molecule comprises a nucleic acid sequence having at least about 70%, 75%, 80%, 85%, 90%, 95%, 96%, 97%, 98%, 99%, or 100% sequence identity to the Anellovirus ORF1/1 nucleotide sequence of Table 7 (e.g., nucleotides 590-712 and/or 2372-2899 of the nucleic acid sequence of Table 7). In embodiments, the nucleic acid molecule comprises a nucleic acid sequence having at least about 70%, 75%, 80%, 85%, 90%, 95%, 96%, 97%, 98%, 99%, or 100% sequence identity to the Anellovirus ORF1/2 nucleotide sequence of Table 7 (e.g., nucleotides 590-712 and/or 2565-2873 of the nucleic acid sequence of Table 7). In embodiments, the nucleic acid molecule comprises a nucleic acid sequence having at least about 70%, 75%, 80%, 85%, 90%, 95%, 96%, 97%, 98%, 99%, or 100% sequence identity to the Anellovirus ORF2 nucleotide sequence of Table 7 (e.g., nucleotides 354-716 of the nucleic acid sequence of Table 7). In embodiments, the nucleic acid molecule comprises a nucleic acid sequence having at least about 70%, 75%, 80%, 85%, 90%, 95%, 96%, 97%, 98%, 99%, or 100% sequence identity to the Anellovirus ORF2/2 nucleotide sequence of Table 7 (e.g., nucleotides 354-712 and/or 2372-2873 of the nucleic acid sequence of Table 7). In embodiments, the nucleic acid molecule comprises a nucleic acid sequence having at least about 70%, 75%, 80%, 85%, 90%, 95%, 96%, 97%, 98%, 99%, or 100% sequence identity to the Anellovirus ORF2/3 nucleotide sequence of Table 7 (e.g., nucleotides 354-712 and/or 2565-3075 of the nucleic acid sequence of Table 7). In embodiments, the nucleic acid molecule comprises a nucleic acid sequence having at least about 70%, 75%, 80%, 85%, 90%, 95%, 96%, 97%, 98%, 99%, or 100% sequence identity to the Anellovirus ORF2t/3 nucleotide sequence of Table 7 (e.g., nucleotides 354-400 and/or 2565-3075 of the nucleic acid sequence of Table 7). In embodiments, the nucleic acid molecule comprises a nucleic acid sequence having at least about 70%, 75%, 80%, 85%, 90%, 95%, 96%, 97%, 98%, 99%, or 100% sequence identity to the Anellovirus TATA box nucleotide sequence of Table 7 (e.g., nucleotides 86-90 of the nucleic acid sequence of Table 7). In embodiments, the nucleic acid molecule comprises a nucleic acid sequence having at least about 70%, 75%, 80%, 85%, 90%, 95%, 96%, 97%, 98%, 99%, or 100% sequence identity to the Anellovirus Cap site nucleotide sequence of Table 7 (e.g., nucleotides 107-114 of the nucleic acid sequence of Table 7). In embodiments, the nucleic acid molecule comprises a nucleic acid sequence having at least about 70%, 75%, 80%, 85%, 90%, 95%, 96%, 97%, 98%, 99%, or 100% sequence identity to the Anellovirus transcriptional start site nucleotide sequence of Table 7 (e.g., nucleotide 114 of the nucleic acid sequence of Table 7). In embodiments, the nucleic acid molecule comprises a nucleic acid sequence having at least about 70%, 75%, 80%, 85%, 90%, 95%, 96%, 97%, 98%, 99%, or 100% sequence identity to the Anellovirus 5′ UTR conserved domain nucleotide sequence of Table 7 (e.g., nucleotides 174-244 of the nucleic acid sequence of Table 7). In embodiments, the nucleic acid molecule comprises a nucleic acid sequence having at least about 70%, 75%, 80%, 85%, 90%, 95%, 96%, 97%, 98%, 99%, or 100% sequence identity to the Anellovirus three open-reading frame region nucleotide sequence of Table 7 (e.g., nucleotides 2551-2870 of the nucleic acid sequence of Table 7). In embodiments, the nucleic acid molecule comprises a nucleic acid sequence having at least about 70%, 75%, 80%, 85%, 90%, 95%, 96%, 97%, 98%, 99%, or 100% sequence identity to the Anellovirus poly(A) signal nucleotide sequence of Table 7 (e.g., nucleotides 3071-3076 of the nucleic acid sequence of Table 7). In embodiments, the nucleic acid molecule comprises a nucleic acid sequence having at least about 70%, 75%, 80%, 85%, 90%, 95%, 96%, 97%, 98%, 99%, or 100% sequence identity to the Anellovirus GC-rich nucleotide sequence of Table 7 (e.g., nucleotides 3733-3853 of the nucleic acid sequence of Table 7).

[0380] In embodiments, the nucleic acid molecule comprises a nucleic acid sequence having at least about 70%, 75%, 80%, 85%, 90%, 95%, 96%, 97%, 98%, 99%, or 100% sequence identity to the Anellovirus ORF1 nucleotide sequence of Table 9 (e.g., nucleotides 577-2787 of the nucleic acid sequence of Table 9). In embodiments, the nucleic acid molecule comprises a nucleic acid sequence having at least about 70%, 75%, 80%, 85%, 90%, 95%, 96%, 97%, 98%, 99%, or 100% sequence identity to the Anellovirus ORF1/1 nucleotide sequence of Table 9 (e.g., nucleotides 577-699 and/or 2311-2787 of the nucleic acid sequence of Table 9). In embodiments, the nucleic acid molecule comprises a nucleic acid sequence having at least about 70%, 75%, 80%, 85%, 90%, 95%, 96%, 97%, 98%, 99%, or 100% sequence identity to the Anellovirus ORF1/2 nucleotide sequence of Table 9 (e.g., nucleotides 577-699 and/or 2504-2806 of the nucleic acid sequence of Table 9). In embodiments, the nucleic acid molecule comprises a nucleic acid sequence having at least about 70%, 75%, 80%, 85%, 90%, 95%, 96%, 97%, 98%, 99%, or 100% sequence identity to the Anellovirus ORF2 nucleotide sequence of Table 9 (e.g., nucleotides 341-703 of the nucleic acid sequence of Table 9). In embodiments, the nucleic acid molecule comprises a nucleic acid sequence having at least about 70%, 75%, 80%, 85%, 90%, 95%, 96%, 97%, 98%, 99%, or 100% sequence identity to the Anellovirus ORF2/2 nucleotide sequence of Table 9 (e.g., nucleotides 341-699 and/or 2311-2806 of the nucleic acid sequence of Table 9). In embodiments, the nucleic acid molecule comprises a nucleic acid sequence having at least about 70%, 75%, 80%, 85%, 90%, 95%, 96%, 97%, 98%, 99%, or 100% sequence identity to the Anellovirus ORF2/3 nucleotide sequence of Table 9 (e.g., nucleotides 341-699 and/or 2504-2978 of the nucleic acid sequence of Table 9). In embodiments, the nucleic acid molecule comprises a nucleic acid sequence having at least about 70%, 75%, 80%, 85%, 90%, 95%, 96%, 97%, 98%, 99%, or 100% sequence identity to the Anellovirus ORF2t/3 nucleotide sequence of Table 9 (e.g., nucleotides 341-387 and/or 2504-2978 of the nucleic acid sequence of Table 9). In embodiments, the nucleic acid molecule comprises a nucleic acid sequence having at least about 70%, 75%, 80%, 85%, 90%, 95%, 96%, 97%, 98%, 99%, or 100% sequence identity to the Anellovirus TATA box nucleotide sequence of Table 9 (e.g., nucleotides 83-87 of the nucleic acid sequence of Table 9). In embodiments, the nucleic acid molecule comprises a nucleic acid sequence having at least about 70%, 75%, 80%, 85%, 90%, 95%, 96%, 97%, 98%, 99%, or 100% sequence identity to the Anellovirus Cap site nucleotide sequence of Table 9 (e.g., nucleotides 104-111 of the nucleic acid sequence of Table 9). In embodiments, the nucleic acid molecule comprises a nucleic acid sequence having at least about 70%, 75%, 80%, 85%, 90%, 95%, 96%, 97%, 98%, 99%, or 100% sequence identity to the Anellovirus transcriptional start site nucleotide sequence of Table 9 (e.g., nucleotide 111 of the nucleic acid sequence of Table 9). In embodiments, the nucleic acid molecule comprises a nucleic acid sequence having at least about 70%, 75%, 80%, 85%, 90%, 95%, 96%, 97%, 98%, 99%, or 100% sequence identity to the Anellovirus 5′ UTR conserved domain nucleotide sequence of Table 9 (e.g., nucleotides 171-241 of the nucleic acid sequence of Table 9). In embodiments, the nucleic acid molecule comprises a nucleic acid sequence having at least about 70%, 75%, 80%, 85%, 90%, 95%, 96%, 97%, 98%, 99%, or 100% sequence identity to the Anellovirus three open-reading frame region nucleotide sequence of Table 9 (e.g., nucleotides 2463-2784 of the nucleic acid sequence of Table 9). In embodiments, the nucleic acid molecule comprises a nucleic acid sequence having at least about 70%, 75%, 80%, 85%, 90%, 95%, 96%, 97%, 98%, 99%, or 100% sequence identity to the Anellovirus poly(A) signal nucleotide sequence of Table 9 (e.g., nucleotides 2974-2979 of the nucleic acid sequence of Table 9). In embodiments, the nucleic acid molecule comprises a nucleic acid sequence having at least about 70%, 75%, 80%, 85%, 90%, 95%, 96%, 97%, 98%, 99%, or 100% sequence identity to the Anellovirus GC-rich nucleotide sequence of Table 9 (e.g., nucleotides 3644-3758 of the nucleic acid sequence of Table 9).

[0381] In embodiments, the nucleic acid molecule comprises a nucleic acid sequence having at least about 70%, 75%, 80%, 85%, 90%, 95%, 96%, 97%, 98%, 99%, or 100% sequence identity to the Anellovirus ORF1 nucleotide sequence of Table 11 (e.g., nucleotides 612-2612 of the nucleic acid sequence of Table 11). In embodiments, the nucleic acid molecule comprises a nucleic acid sequence having at least about 70%, 75%, 80%, 85%, 90%, 95%, 96%, 97%, 98%, 99%, or 100% sequence identity to the Anellovirus ORF1/1 nucleotide sequence of Table 11 (e.g., nucleotides 612-719 and/or 2274-2612 of the nucleic acid sequence of Table 11). In embodiments, the nucleic acid molecule comprises a nucleic acid sequence having at least about 70%, 75%, 80%, 85%, 90%, 95%, 96%, 97%, 98%, 99%, or 100% sequence identity to the Anellovirus ORF1/2 nucleotide sequence of Table 11 (e.g., nucleotides 612-719 and/or 2449-2589 of the nucleic acid sequence of Table 11). In embodiments, the nucleic acid molecule comprises a nucleic acid sequence having at least about 70%, 75%, 80%, 85%, 90%, 95%, 96%, 97%, 98%, 99%, or 100% sequence identity to the Anellovirus ORF2 nucleotide sequence of Table 11 (e.g., nucleotides 424-723 of the nucleic acid sequence of Table 11). In embodiments, the nucleic acid molecule comprises a nucleic acid sequence having at least about 70%, 75%, 80%, 85%, 90%, 95%, 96%, 97%, 98%, 99%, or 100% sequence identity to the Anellovirus ORF2/2 nucleotide sequence of Table 11 (e.g., nucleotides 424-719 and/or 2274-2589 of the nucleic acid sequence of Table 11). In embodiments, the nucleic acid molecule comprises a nucleic acid sequence having at least about 70%, 75%, 80%, 85%, 90%, 95%, 96%, 97%, 98%, 99%, or 100% sequence identity to the Anellovirus ORF2/3 nucleotide sequence of Table 11 (e.g., nucleotides 424-719 and/or 2449-2812 of the nucleic acid sequence of Table 11). In embodiments, the nucleic acid molecule comprises a nucleic acid sequence having at least about 70%, 75%, 80%, 85%, 90%, 95%, 96%, 97%, 98%, 99%, or 100% sequence identity to the Anellovirus TATA box nucleotide sequence of Table 11 (e.g., nucleotides 237-243 of the nucleic acid sequence of Table 11). In embodiments, the nucleic acid molecule comprises a nucleic acid sequence having at least about 70%, 75%, 80%, 85%, 90%, 95%, 96%, 97%, 98%, 99%, or 100% sequence identity to the Anellovirus Cap site nucleotide sequence of Table 11 (e.g., nucleotides 260-267 of the nucleic acid sequence of Table 11). In embodiments, the nucleic acid molecule comprises a nucleic acid sequence having at least about 70%, 75%, 80%, 85%, 90%, 95%, 96%, 97%, 98%, 99%, or 100% sequence identity to the Anellovirus transcriptional start site nucleotide sequence of Table 11 (e.g., nucleotide 267 of the nucleic acid sequence of Table 11). In embodiments, the nucleic acid molecule comprises a nucleic acid sequence having at least about 70%, 75%, 80%, 85%, 90%, 95%, 96%, 97%, 98%, 99%, or 100% sequence identity to the Anellovirus 5′ UTR conserved domain nucleotide sequence of Table 11 (e.g., nucleotides 323-393 of the nucleic acid sequence of Table 11). In embodiments, the nucleic acid molecule comprises a nucleic acid sequence having at least about 70%, 75%, 80%, 85%, 90%, 95%, 96%, 97%, 98%, 99%, or 100% sequence identity to the Anellovirus three open-reading frame region nucleotide sequence of Table 11 (e.g., nucleotides 2441-2586 of the nucleic acid sequence of Table 11). In embodiments, the nucleic acid molecule comprises a nucleic acid sequence having at least about 70%, 75%, 80%, 85%, 90%, 95%, 96%, 97%, 98%, 99%, or 100% sequence identity to the Anellovirus poly(A) signal nucleotide sequence of Table 11 (e.g., nucleotides 2808-2813 of the nucleic acid sequence of Table 11). In embodiments, the nucleic acid molecule comprises a nucleic acid sequence having at least about 70%, 75%, 80%, 85%, 90%, 95%, 96%, 97%, 98%, 99%, or 100% sequence identity to the Anellovirus GC-rich nucleotide sequence of Table 11 (e.g., nucleotides 2868-2929 of the nucleic acid sequence of Table 11).

[0382] In embodiments, the nucleic acid molecule comprises a nucleic acid sequence having at least about 70%, 75%, 80%, 85%, 90%, 95%, 96%, 97%, 98%, 99%, or 100% sequence identity to the Anellovirus ORF1 nucleotide sequence of Table 13 (e.g., nucleotides 432-2453 of the nucleic acid sequence of Table 13). In embodiments, the nucleic acid molecule comprises a nucleic acid sequence having at least about 70%, 75%, 80%, 85%, 90%, 95%, 96%, 97%, 98%, 99%, or 100% sequence identity to the Anellovirus ORF1/1 nucleotide sequence of Table 13 (e.g., nucleotides 432-584 and/or 1977-2453 of the nucleic acid sequence of Table 13). In embodiments, the nucleic acid molecule comprises a nucleic acid sequence having at least about 70%, 75%, 80%, 85%, 90%, 95%, 96%, 97%, 98%, 99%, or 100% sequence identity to the Anellovirus ORF1/2 nucleotide sequence of Table 13 (e.g., nucleotides 432-584 and/or 2197-2388 of the nucleic acid sequence of Table 13). In embodiments, the nucleic acid molecule comprises a nucleic acid sequence having at least about 70%, 75%, 80%, 85%, 90%, 95%, 96%, 97%, 98%, 99%, or 100% sequence identity to the Anellovirus ORF2 nucleotide sequence of Table 13 (e.g., nucleotides 283-588 of the nucleic acid sequence of Table 13). In embodiments, the nucleic acid molecule comprises a nucleic acid sequence having at least about 70%, 75%, 80%, 85%, 90%, 95%, 96%, 97%, 98%, 99%, or 100% sequence identity to the Anellovirus ORF2/2 nucleotide sequence of Table 13 (e.g., nucleotides 283-584 and/or 1977-2388 of the nucleic acid sequence of Table 13). In embodiments, the nucleic acid molecule comprises a nucleic acid sequence having at least about 70%, 75%, 80%, 85%, 90%, 95%, 96%, 97%, 98%, 99%, or 100% sequence identity to the Anellovirus ORF2/3 nucleotide sequence of Table 13 (e.g., nucleotides 283-584 and/or 2197-2614 of the nucleic acid sequence of Table 13). In embodiments, the nucleic acid molecule comprises a nucleic acid sequence having at least about 70%, 75%, 80%, 85%, 90%, 95%, 96%, 97%, 98%, 99%, or 100% sequence identity to the Anellovirus TATA box nucleotide sequence of Table 13 (e.g., nucleotides 21-25 of the nucleic acid sequence of Table 13). In embodiments, the nucleic acid molecule comprises a nucleic acid sequence having at least about 70%, 75%, 80%, 85%, 90%, 95%, 96%, 97%, 98%, 99%, or 100% sequence identity to the Anellovirus Cap site nucleotide sequence of Table 13 (e.g., nucleotides 42-49 of the nucleic acid sequence of Table 13). In embodiments, the nucleic acid molecule comprises a nucleic acid sequence having at least about 70%, 75%, 80%, 85%, 90%, 95%, 96%, 97%, 98%, 99%, or 100% sequence identity to the Anellovirus transcriptional start site nucleotide sequence of Table 13 (e.g., nucleotide 49 of the nucleic acid sequence of Table 13). In embodiments, the nucleic acid molecule comprises a nucleic acid sequence having at least about 70%, 75%, 80%, 85%, 90%, 95%, 96%, 97%, 98%, 99%, or 100% sequence identity to the Anellovirus 5′ UTR conserved domain nucleotide sequence of Table 13 (e.g., nucleotides 117-187 of the nucleic acid sequence of Table 13). In embodiments, the nucleic acid molecule comprises a nucleic acid sequence having at least about 70%, 75%, 80%, 85%, 90%, 95%, 96%, 97%, 98%, 99%, or 100% sequence identity to the Anellovirus three open-reading frame region nucleotide sequence of Table 13 (e.g., nucleotides 2186-2385 of the nucleic acid sequence of Table 13). In embodiments, the nucleic acid molecule comprises a nucleic acid sequence having at least about 70%, 75%, 80%, 85%, 90%, 95%, 96%, 97%, 98%, 99%, or 100% sequence identity to the Anellovirus poly(A) signal nucleotide sequence of Table 13 (e.g., nucleotides 2676-2681 of the nucleic acid sequence of Table 13). In embodiments, the nucleic acid molecule comprises a nucleic acid sequence having at least about 70%, 75%, 80%, 85%, 90%, 95%, 96%, 97%, 98%, 99%, or 100% sequence identity to the Anellovirus GC-rich nucleotide sequence of Table 13 (e.g., nucleotides 3054-3172 of the nucleic acid sequence of Table 13).

[0383] In embodiments, the nucleic acid molecule comprises a nucleic acid sequence encoding an amino acid sequence having at least about 70%, 75%, 80%, 85%, 90%, 95%, 96%, 97%, 98%, 99%, or 100% sequence identity to the Anellovirus ORF1 amino acid sequence of Table 2. In embodiments, the nucleic acid molecule comprises a nucleic acid sequence encoding an amino acid sequence having at least about 70%, 75%, 80%, 85%, 90%, 95%, 96%, 97%, 98%, 99%, or 100% sequence identity to the Anellovirus ORF1/1 amino acid sequence of Table 2. In embodiments, the nucleic acid molecule comprises a nucleic acid sequence encoding an amino acid sequence having at least about 70%, 75%, 80%, 85%, 90%, 95%, 96%, 97%, 98%, 99%, or 100% sequence identity to the Anellovirus ORF1/2 amino acid sequence of Table 2. In embodiments, the nucleic acid molecule comprises a nucleic acid sequence encoding an amino acid sequence having at least about 70%, 75%, 80%, 85%, 90%, 95%, 96%, 97%, 98%, 99%, or 100% sequence identity to the Anellovirus ORF2 amino acid sequence of Table 2. In embodiments, the nucleic acid molecule comprises a nucleic acid sequence encoding an amino acid sequence having at least about 70%, 75%, 80%, 85%, 90%, 95%, 96%, 97%, 98%, 99%, or 100% sequence identity to the Anellovirus ORF2/2 amino acid sequence of Table 2. In embodiments, the nucleic acid molecule comprises a nucleic acid sequence encoding an amino acid sequence having at least about 70%, 75%, 80%, 85%, 90%, 95%, 96%, 97%, 98%, 99%, or 100% sequence identity to the Anellovirus ORF2/3 amino acid sequence of Table 2. In embodiments, the nucleic acid molecule comprises a nucleic acid sequence encoding an amino acid sequence having at least about 70%, 75%, 80%, 85%, 90%, 95%, 96%, 97%, 98%, 99%, or 100% sequence identity to the Anellovirus ORF2t/3 amino acid sequence of Table 2.

[0384] In embodiments, the nucleic acid molecule comprises a nucleic acid sequence encoding an amino acid sequence having at least about 70%, 75%, 80%, 85%, 90%, 95%, 96%, 97%, 98%, 99%, or 100% sequence identity to the Anellovirus ORF1 amino acid sequence of Table 4. In embodiments, the nucleic acid molecule comprises a nucleic acid sequence encoding an amino acid sequence having at least about 70%, 75%, 80%, 85%, 90%, 95%, 96%, 97%, 98%, 99%, or 100% sequence identity to the Anellovirus ORF1/1 amino acid sequence of Table 4. In embodiments, the nucleic acid molecule comprises a nucleic acid sequence encoding an amino acid sequence having at least about 70%, 75%, 80%, 85%, 90%, 95%, 96%, 97%, 98%, 99%, or 100% sequence identity to the Anellovirus ORF1/2 amino acid sequence of Table 4. In embodiments, the nucleic acid molecule comprises a nucleic acid sequence encoding an amino acid sequence having at least about 70%, 75%, 80%, 85%, 90%, 95%, 96%, 97%, 98%, 99%, or 100% sequence identity to the Anellovirus ORF2 amino acid sequence of Table 4. In embodiments, the nucleic acid molecule comprises a nucleic acid sequence encoding an amino acid sequence having at least about 70%, 75%, 80%, 85%, 90%, 95%, 96%, 97%, 98%, 99%, or 100% sequence identity to the Anellovirus ORF2/2 amino acid sequence of Table 4. In embodiments, the nucleic acid molecule comprises a nucleic acid sequence encoding an amino acid sequence having at least about 70%, 75%, 80%, 85%, 90%, 95%, 96%, 97%, 98%, 99%, or 100% sequence identity to the Anellovirus ORF2/3 amino acid sequence of Table 4. In embodiments, the nucleic acid molecule comprises a nucleic acid sequence encoding an amino acid sequence having at least about 70%, 75%, 80%, 85%, 90%, 95%, 96%, 97%, 98%, 99%, or 100% sequence identity to the Anellovirus ORF2t/3 amino acid sequence of Table 4.

[0385] In embodiments, the nucleic acid molecule comprises a nucleic acid sequence encoding an amino acid sequence having at least about 70%, 75%, 80%, 85%, 90%, 95%, 96%, 97%, 98%, 99%, or 100% sequence identity to the Anellovirus ORF1 amino acid sequence of Table 6. In embodiments, the nucleic acid molecule comprises a nucleic acid sequence encoding an amino acid sequence having at least about 70%, 75%, 80%, 85%, 90%, 95%, 96%, 97%, 98%, 99%, or 100% sequence identity to the Anellovirus ORF1/1 amino acid sequence of Table 6. In embodiments, the nucleic acid molecule comprises a nucleic acid sequence encoding an amino acid sequence having at least about 70%, 75%, 80%, 85%, 90%, 95%, 96%, 97%, 98%, 99%, or 100% sequence identity to the Anellovirus ORF1/2 amino acid sequence of Table 6. In embodiments, the nucleic acid molecule comprises a nucleic acid sequence encoding an amino acid sequence having at least about 70%, 75%, 80%, 85%, 90%, 95%, 96%, 97%, 98%, 99%, or 100% sequence identity to the Anellovirus ORF2 amino acid sequence of Table 6. In embodiments, the nucleic acid molecule comprises a nucleic acid sequence encoding an amino acid sequence having at least about 70%, 75%, 80%, 85%, 90%, 95%, 96%, 97%, 98%, 99%, or 100% sequence identity to the Anellovirus ORF2/2 amino acid sequence of Table 6. In embodiments, the nucleic acid molecule comprises a nucleic acid sequence encoding an amino acid sequence having at least about 70%, 75%, 80%, 85%, 90%, 95%, 96%, 97%, 98%, 99%, or 100% sequence identity to the Anellovirus ORF2/3 amino acid sequence of Table 6. In embodiments, the nucleic acid molecule comprises a nucleic acid sequence encoding an amino acid sequence having at least about 70%, 75%, 80%, 85%, 90%, 95%, 96%, 97%, 98%, 99%, or 100% sequence identity to the Anellovirus ORF2t/3 amino acid sequence of Table 6.

[0386] In embodiments, the nucleic acid molecule comprises a nucleic acid sequence encoding an amino acid sequence having at least about 70%, 75%, 80%, 85%, 90%, 95%, 96%, 97%, 98%, 99%, or 100% sequence identity to the Anellovirus ORF1 amino acid sequence of Table 8. In embodiments, the nucleic acid molecule comprises a nucleic acid sequence encoding an amino acid sequence having at least about 70%, 75%, 80%, 85%, 90%, 95%, 96%, 97%, 98%, 99%, or 100% sequence identity to the Anellovirus ORF1/1 amino acid sequence of Table 8. In embodiments, the nucleic acid molecule comprises a nucleic acid sequence encoding an amino acid sequence having at least about 70%, 75%, 80%, 85%, 90%, 95%, 96%, 97%, 98%, 99%, or 100% sequence identity to the Anellovirus ORF1/2 amino acid sequence of Table 8. In embodiments, the nucleic acid molecule comprises a nucleic acid sequence encoding an amino acid sequence having at least about 70%, 75%, 80%, 85%, 90%, 95%, 96%, 97%, 98%, 99%, or 100% sequence identity to the Anellovirus ORF2 amino acid sequence of Table 8. In embodiments, the nucleic acid molecule comprises a nucleic acid sequence encoding an amino acid sequence having at least about 70%, 75%, 80%, 85%, 90%, 95%, 96%, 97%, 98%, 99%, or 100% sequence identity to the Anellovirus ORF2/2 amino acid sequence of Table 8. In embodiments, the nucleic acid molecule comprises a nucleic acid sequence encoding an amino acid sequence having at least about 70%, 75%, 80%, 85%, 90%, 95%, 96%, 97%, 98%, 99%, or 100% sequence identity to the Anellovirus ORF2/3 amino acid sequence of Table 8. In embodiments, the nucleic acid molecule comprises a nucleic acid sequence encoding an amino acid sequence having at least about 70%, 75%, 80%, 85%, 90%, 95%, 96%, 97%, 98%, 99%, or 100% sequence identity to the Anellovirus ORF2t/3 amino acid sequence of Table 8.

[0387] In embodiments, the nucleic acid molecule comprises a nucleic acid sequence encoding an amino acid sequence having at least about 70%, 75%, 80%, 85%, 90%, 95%, 96%, 97%, 98%, 99%, or 100% sequence identity to the Anellovirus ORF1 amino acid sequence of Table 10. In embodiments, the nucleic acid molecule comprises a nucleic acid sequence encoding an amino acid sequence having at least about 70%, 75%, 80%, 85%, 90%, 95%, 96%, 97%, 98%, 99%, or 100% sequence identity to the Anellovirus ORF1/1 amino acid sequence of Table 10. In embodiments, the nucleic acid molecule comprises a nucleic acid sequence encoding an amino acid sequence having at least about 70%, 75%, 80%, 85%, 90%, 95%, 96%, 97%, 98%, 99%, or 100% sequence identity to the Anellovirus ORF1/2 amino acid sequence of Table 10. In embodiments, the nucleic acid molecule comprises a nucleic acid sequence encoding an amino acid sequence having at least about 70%, 75%, 80%, 85%, 90%, 95%, 96%, 97%, 98%, 99%, or 100% sequence identity to the Anellovirus ORF2 amino acid sequence of Table 10. In embodiments, the nucleic acid molecule comprises a nucleic acid sequence encoding an amino acid sequence having at least about 70%, 75%, 80%, 85%, 90%, 95%, 96%, 97%, 98%, 99%, or 100% sequence identity to the Anellovirus ORF2/2 amino acid sequence of Table 10. In embodiments, the nucleic acid molecule comprises a nucleic acid sequence encoding an amino acid sequence having at least about 70%, 75%, 80%, 85%, 90%, 95%, 96%, 97%, 98%, 99%, or 100% sequence identity to the Anellovirus ORF2/3 amino acid sequence of Table 10. In embodiments, the nucleic acid molecule comprises a nucleic acid sequence encoding an amino acid sequence having at least about 70%, 75%, 80%, 85%, 90%, 95%, 96%, 97%, 98%, 99%, or 100% sequence identity to the Anellovirus ORF2t/3 amino acid sequence of Table 10.

[0388] In embodiments, the nucleic acid molecule comprises a nucleic acid sequence encoding an amino acid sequence having at least about 70%, 75%, 80%, 85%, 90%, 95%, 96%, 97%, 98%, 99%, or 100% sequence identity to the Anellovirus ORF1 amino acid sequence of Table 12. In embodiments, the nucleic acid molecule comprises a nucleic acid sequence encoding an amino acid sequence having at least about 70%, 75%, 80%, 85%, 90%, 95%, 96%, 97%, 98%, 99%, or 100% sequence identity to the Anellovirus ORF1/1 amino acid sequence of Table 12. In embodiments, the nucleic acid molecule comprises a nucleic acid sequence encoding an amino acid sequence having at least about 70%, 75%, 80%, 85%, 90%, 95%, 96%, 97%, 98%, 99%, or 100% sequence identity to the Anellovirus ORF1/2 amino acid sequence of Table 12. In embodiments, the nucleic acid molecule comprises a nucleic acid sequence encoding an amino acid sequence having at least about 70%, 75%, 80%, 85%, 90%, 95%, 96%, 97%, 98%, 99%, or 100% sequence identity to the Anellovirus ORF2 amino acid sequence of Table 12. In embodiments, the nucleic acid molecule comprises a nucleic acid sequence encoding an amino acid sequence having at least about 70%, 75%, 80%, 85%, 90%, 95%, 96%, 97%, 98%, 99%, or 100% sequence identity to the Anellovirus ORF2/2 amino acid sequence of Table 12. In embodiments, the nucleic acid molecule comprises a nucleic acid sequence encoding an amino acid sequence having at least about 70%, 75%, 80%, 85%, 90%, 95%, 96%, 97%, 98%, 99%, or 100% sequence identity to the Anellovirus ORF2/3 amino acid sequence of Table 12.

[0389] In embodiments, the nucleic acid molecule comprises a nucleic acid sequence encoding an amino acid sequence having at least about 70%, 75%, 80%, 85%, 90%, 95%, 96%, 97%, 98%, 99%, or 100% sequence identity to the Anellovirus ORF1 amino acid sequence of Table 14. In embodiments, the nucleic acid molecule comprises a nucleic acid sequence encoding an amino acid sequence having at least about 70%, 75%, 80%, 85%, 90%, 95%, 96%, 97%, 98%, 99%, or 100% sequence identity to the Anellovirus ORF1/1 amino acid sequence of Table 14. In embodiments, the nucleic acid molecule comprises a nucleic acid sequence encoding an amino acid sequence having at least about 70%, 75%, 80%, 85%, 90%, 95%, 96%, 97%, 98%, 99%, or 100% sequence identity to the Anellovirus ORF1/2 amino acid sequence of Table 14. In embodiments, the nucleic acid molecule comprises a nucleic acid sequence encoding an amino acid sequence having at least about 70%, 75%, 80%, 85%, 90%, 95%, 96%, 97%, 98%, 99%, or 100% sequence identity to the Anellovirus ORF2 amino acid sequence of Table 14. In embodiments, the nucleic acid molecule comprises a nucleic acid sequence encoding an amino acid sequence having at least about 70%, 75%, 80%, 85%, 90%, 95%, 96%, 97%, 98%, 99%, or 100% sequence identity to the Anellovirus ORF2/2 amino acid sequence of Table 14. In embodiments, the nucleic acid molecule comprises a nucleic acid sequence encoding an amino acid sequence having at least about 70%, 75%, 80%, 85%, 90%, 95%, 96%, 97%, 98%, 99%, or 100% sequence identity to the Anellovirus ORF2/3 amino acid sequence of Table 14.

[0390] In embodiments, the curon described herein comprises a protein having an amino acid sequence having at least about 70%, 75%, 80%, 85%, 90%, 95%, 96%, 97%, 98%, 99%, or 100% sequence identity to the Anellovirus ORF1 amino acid sequence of Table 2. In embodiments, the curon described herein comprises a protein having an amino acid sequence having at least about 70%, 75%, 80%, 85%, 90%, 95%, 96%, 97%, 98%, 99%, or 100% sequence identity to the Anellovirus ORF1/1 amino acid sequence of Table 2. In embodiments, the curon described herein comprises a protein having an amino acid sequence having at least about 70%, 75%, 80%, 85%, 90%, 95%, 96%, 97%, 98%, 99%, or 100% sequence identity to the Anellovirus ORF1/2 amino acid sequence of Table 2. In embodiments, the curon described herein comprises a protein having an amino acid sequence having at least about 70%, 75%, 80%, 85%, 90%, 95%, 96%, 97%, 98%, 99%, or 100% sequence identity to the Anellovirus ORF2 amino acid sequence of Table 2. In embodiments, the curon described herein comprises a protein having an amino acid sequence having at least about 70%, 75%, 80%, 85%, 90%, 95%, 96%, 97%, 98%, 99%, or 100% sequence identity to the Anellovirus ORF2/2 amino acid sequence of Table 2. In embodiments, the curon described herein comprises a protein having an amino acid sequence having at least about 70%, 75%, 80%, 85%, 90%, 95%, 96%, 97%, 98%, 99%, or 100% sequence identity to the Anellovirus ORF2/3 amino acid sequence of Table 2. In embodiments, the curon described herein comprises a protein having an amino acid sequence having at least about 70%, 75%, 80%, 85%, 90%, 95%, 96%, 97%, 98%, 99%, or 100% sequence identity to the Anellovirus ORF2t/3 amino acid sequence of Table 2.

[0391] In embodiments, the curon described herein comprises a protein having an amino acid sequence having at least about 70%, 75%, 80%, 85%, 90%, 95%, 96%, 97%, 98%, 99%, or 100% sequence identity to the Anellovirus ORF1 amino acid sequence of Table 4. In embodiments, the curon described herein comprises a protein having an amino acid sequence having at least about 70%, 75%, 80%, 85%, 90%, 95%, 96%, 97%, 98%, 99%, or 100% sequence identity to the Anellovirus ORF1/1 amino acid sequence of Table 4. In embodiments, the curon described herein comprises a protein having an amino acid sequence having at least about 70%, 75%, 80%, 85%, 90%, 95%, 96%, 97%, 98%, 99%, or 100% sequence identity to the Anellovirus ORF1/2 amino acid sequence of Table 4. In embodiments, the curon described herein comprises a protein having an amino acid sequence having at least about 70%, 75%, 80%, 85%, 90%, 95%, 96%, 97%, 98%, 99%, or 100% sequence identity to the Anellovirus ORF2 amino acid sequence of Table 4. In embodiments, the curon described herein comprises a protein having an amino acid sequence having at least about 70%, 75%, 80%, 85%, 90%, 95%, 96%, 97%, 98%, 99%, or 100% sequence identity to the Anellovirus ORF2/2 amino acid sequence of Table 4. In embodiments, the curon described herein comprises a protein having an amino acid sequence having at least about 70%, 75%, 80%, 85%, 90%, 95%, 96%, 97%, 98%, 99%, or 100% sequence identity to the Anellovirus ORF2/3 amino acid sequence of Table 4. In embodiments, the curon described herein comprises a protein having an amino acid sequence having at least about 70%, 75%, 80%, 85%, 90%, 95%, 96%, 97%, 98%, 99%, or 100% sequence identity to the Anellovirus ORF2t/3 amino acid sequence of Table 4.

[0392] In embodiments, the curon described herein comprises a protein having an amino acid sequence having at least about 70%, 75%, 80%, 85%, 90%, 95%, 96%, 97%, 98%, 99%, or 100% sequence identity to the Anellovirus ORF1 amino acid sequence of Table 6. In embodiments, the curon described herein comprises a protein having an amino acid sequence having at least about 70%, 75%, 80%, 85%, 90%, 95%, 96%, 97%, 98%, 99%, or 100% sequence identity to the Anellovirus ORF1/1 amino acid sequence of Table 6. In embodiments, the curon described herein comprises a protein having an amino acid sequence having at least about 70%, 75%, 80%, 85%, 90%, 95%, 96%, 97%, 98%, 99%, or 100% sequence identity to the Anellovirus ORF1/2 amino acid sequence of Table 6. In embodiments, the curon described herein comprises a protein having an amino acid sequence having at least about 70%, 75%, 80%, 85%, 90%, 95%, 96%, 97%, 98%, 99%, or 100% sequence identity to the Anellovirus ORF2 amino acid sequence of Table 6. In embodiments, the curon described herein comprises a protein having an amino acid sequence having at least about 70%, 75%, 80%, 85%, 90%, 95%, 96%, 97%, 98%, 99%, or 100% sequence identity to the Anellovirus ORF2/2 amino acid sequence of Table 6. In embodiments, the curon described herein comprises a protein having an amino acid sequence having at least about 70%, 75%, 80%, 85%, 90%, 95%, 96%, 97%, 98%, 99%, or 100% sequence identity to the Anellovirus ORF2/3 amino acid sequence of Table 6. In embodiments, the curon described herein comprises a protein having an amino acid sequence having at least about 70%, 75%, 80%, 85%, 90%, 95%, 96%, 97%, 98%, 99%, or 100% sequence identity to the Anellovirus ORF2t/3 amino acid sequence of Table 6.

[0393] In embodiments, the curon described herein comprises a protein having an amino acid sequence having at least about 70%, 75%, 80%, 85%, 90%, 95%, 96%, 97%, 98%, 99%, or 100% sequence identity to the Anellovirus ORF1 amino acid sequence of Table 8. In embodiments, the curon described herein comprises a protein having an amino acid sequence having at least about 70%, 75%, 80%, 85%, 90%, 95%, 96%, 97%, 98%, 99%, or 100% sequence identity to the Anellovirus ORF1/1 amino acid sequence of Table 8. In embodiments, the curon described herein comprises a protein having an amino acid sequence having at least about 70%, 75%, 80%, 85%, 90%, 95%, 96%, 97%, 98%, 99%, or 100% sequence identity to the Anellovirus ORF1/2 amino acid sequence of Table 8. In embodiments, the curon described herein comprises a protein having an amino acid sequence having at least about 70%, 75%, 80%, 85%, 90%, 95%, 96%, 97%, 98%, 99%, or 100% sequence identity to the Anellovirus ORF2 amino acid sequence of Table 8. In embodiments, the curon described herein comprises a protein having an amino acid sequence having at least about 70%, 75%, 80%, 85%, 90%, 95%, 96%, 97%, 98%, 99%, or 100% sequence identity to the Anellovirus ORF2/2 amino acid sequence of Table 8. In embodiments, the curon described herein comprises a protein having an amino acid sequence having at least about 70%, 75%, 80%, 85%, 90%, 95%, 96%, 97%, 98%, 99%, or 100% sequence identity to the Anellovirus ORF2/3 amino acid sequence of Table 8. In embodiments, the curon described herein comprises a protein having an amino acid sequence having at least about 70%, 75%, 80%, 85%, 90%, 95%, 96%, 97%, 98%, 99%, or 100% sequence identity to the Anellovirus ORF2t/3 amino acid sequence of Table 8.

[0394] In embodiments, the curon described herein comprises a protein having an amino acid sequence having at least about 70%, 75%, 80%, 85%, 90%, 95%, 96%, 97%, 98%, 99%, or 100% sequence identity to the Anellovirus ORF1 amino acid sequence of Table 10. In embodiments, the curon described herein comprises a protein having an amino acid sequence having at least about 70%, 75%, 80%, 85%, 90%, 95%, 96%, 97%, 98%, 99%, or 100% sequence identity to the Anellovirus ORF1/1 amino acid sequence of Table 10. In embodiments, the curon described herein comprises a protein having an amino acid sequence having at least about 70%, 75%, 80%, 85%, 90%, 95%, 96%, 97%, 98%, 99%, or 100% sequence identity to the Anellovirus ORF1/2 amino acid sequence of Table 10. In embodiments, the curon described herein comprises a protein having an amino acid sequence having at least about 70%, 75%, 80%, 85%, 90%, 95%, 96%, 97%, 98%, 99%, or 100% sequence identity to the Anellovirus ORF2 amino acid sequence of Table 10. In embodiments, the curon described herein comprises a protein having an amino acid sequence having at least about 70%, 75%, 80%, 85%, 90%, 95%, 96%, 97%, 98%, 99%, or 100% sequence identity to the Anellovirus ORF2/2 amino acid sequence of Table 10. In embodiments, the curon described herein comprises a protein having an amino acid sequence having at least about 70%, 75%, 80%, 85%, 90%, 95%, 96%, 97%, 98%, 99%, or 100% sequence identity to the Anellovirus ORF2/3 amino acid sequence of Table 10. In embodiments, the curon described herein comprises a protein having an amino acid sequence having at least about 70%, 75%, 80%, 85%, 90%, 95%, 96%, 97%, 98%, 99%, or 100% sequence identity to the Anellovirus ORF2t/3 amino acid sequence of Table 10.

[0395] In embodiments, the curon described herein comprises a protein having an amino acid sequence having at least about 70%, 75%, 80%, 85%, 90%, 95%, 96%, 97%, 98%, 99%, or 100% sequence identity to the Anellovirus ORF1 amino acid sequence of Table 12. In embodiments, the curon described herein comprises a protein having an amino acid sequence having at least about 70%, 75%, 80%, 85%, 90%, 95%, 96%, 97%, 98%, 99%, or 100% sequence identity to the Anellovirus ORF1/1 amino acid sequence of Table 12. In embodiments, the curon described herein comprises a protein having an amino acid sequence having at least about 70%, 75%, 80%, 85%, 90%, 95%, 96%, 97%, 98%, 99%, or 100% sequence identity to the Anellovirus ORF1/2 amino acid sequence of Table 12. In embodiments, the curon described herein comprises a protein having an amino acid sequence having at least about 70%, 75%, 80%, 85%, 90%, 95%, 96%, 97%, 98%, 99%, or 100% sequence identity to the Anellovirus ORF2 amino acid sequence of Table 12. In embodiments, the curon described herein comprises a protein having an amino acid sequence having at least about 70%, 75%, 80%, 85%, 90%, 95%, 96%, 97%, 98%, 99%, or 100% sequence identity to the Anellovirus ORF2/2 amino acid sequence of Table 12. In embodiments, the curon described herein comprises a protein having an amino acid sequence having at least about 70%, 75%, 80%, 85%, 90%, 95%, 96%, 97%, 98%, 99%, or 100% sequence identity to the Anellovirus ORF2/3 amino acid sequence of Table 12.

[0396] In embodiments, the curon described herein comprises a protein having an amino acid sequence having at least about 70%, 75%, 80%, 85%, 90%, 95%, 96%, 97%, 98%, 99%, or 100% sequence identity to the Anellovirus ORF1 amino acid sequence of Table 14. In embodiments, the curon described herein comprises a protein having an amino acid sequence having at least about 70%, 75%, 80%, 85%, 90%, 95%, 96%, 97%, 98%, 99%, or 100% sequence identity to the Anellovirus ORF1/1 amino acid sequence of Table 14. In embodiments, the curon described herein comprises a protein having an amino acid sequence having at least about 70%, 75%, 80%, 85%, 90%, 95%, 96%, 97%, 98%, 99%, or 100% sequence identity to the Anellovirus ORF1/2 amino acid sequence of Table 14. In embodiments, the curon described herein comprises a protein having an amino acid sequence having at least about 70%, 75%, 80%, 85%, 90%, 95%, 96%, 97%, 98%, 99%, or 100% sequence identity to the Anellovirus ORF2 amino acid sequence of Table 14. In embodiments, the curon described herein comprises a protein having an amino acid sequence having at least about 70%, 75%, 80%, 85%, 90%, 95%, 96%, 97%, 98%, 99%, or 100% sequence identity to the Anellovirus ORF2/2 amino acid sequence of Table 14. In embodiments, the curon described herein comprises a protein having an amino acid sequence having at least about 70%, 75%, 80%, 85%, 90%, 95%, 96%, 97%, 98%, 99%, or 100% sequence identity to the Anellovirus ORF2/3 amino acid sequence of Table 14.

TABLE 1
Exemplary Anellovirus nucleic acid sequence
(Alphatorquevirus, Clade 1)

```
Name TTV-CT30F
Genus/Clade Alphatorquevirus,
                                                              Clade 1
Accession Number AB064597.1
Full Sequence: 3570 bp
1 10 20 30 40 50
| | | | | |
ATTTTGTGCAGCCCGCCAATTCTCGTTCAAACAGGCCAATCAGGAGGCTC
TACGTACACTTCCTGGGGTGTGTCTTCGAAGAGTATATAAGCAGAGGCGG
TGACGAATGGTAGAGTTTTTCCTGGCCCGTCCGCGGCGAGAGCGCGAGCG
GAGCGAGCGATCGAGCGTCCCGTGGGCGGGTGCCGTAGGTGAGTTTACAC
ACCGCAGTCAAGGGGCAATTCGGGCTCGGGACTGGCCGGGCTATGGGCAA
GATTCTTAAAAAATTCCCCCGATCCCTCTGTCGCCAGGACATAAAAACAT
GCCGTGGAGACCGCCGGTGCATAGTGTCCAGGGGCGAGAGGATCAGTGGT
TCGCGAGCTTTTTTCACGGCCACGCTTCATTTTGCGGTTGCGGTGACGCT
GTTGGCCATCTTAATAGCATTGCTCCTCGCTTTCCTCGCGCCGGTCCACC
AAGGCCCCCTCCGGGGCTAGAGCAGCCTAACCCCCCGCAGCAGGGCCCGG
CCGGGCCCGGAGGGCCGCCCGCCATCTTGGCGCTGCCGGCTCCGCCCGCG
GAGCCTGACGACCCGCAGCCACGGCGTGGTGGTGGGGACGGTGGCGCCGC
CGCTGGCGCCGCAGGCGACCGTGGAGACCGAGACTACGACGAAGAAGAGC
TAGACGAGCTTTTCCGCGCCGCCGCCGAAGACGATTTGTAAGTAGGAGAT
GGCGCCGGCCTTACAGGCGCAGGAGGAGACGCGGGCGACGCAGACGCAGA
CGCAGACGCAGACATAAGCCCACCCTAGTACTCAGACAGTGGCAACCTGA
CGTTATCAGACACTGTAAGATAACAGGACGGATGCCCCTCATTATCTGTG
GAAAGGGGTCCACCCAGTTCAACTACATCACCCACGCGGACGACATCACC
CCCAGGGGAGCCTCCTACGGGGGCAACTTCACAAACATGACTTTCTCCCT
GGAGGCAATATACGAACAGTTTCTGTACCACAGAAACAGGTGGTCAGCCT
CCAACCACGACCTCGAACTCTGCAGATACAAGGGTACCACCCTAAAACTG
TACAGGCACCCAGATGTAGACTACATAGTCACCTACAGCAGAACGGGACC
CTTTGAGATCAGCCACATGACCTACCTCAGCACTCACCCCCTTCTCATGC
TGCTAAACAAACACCACATAGTGGTGCCCAGCCTAAAGACTAAGCCCAGG
GGCAGAAAGGCCATAAAAGTCAGAATAAGACCCCCCAAACTCATGAACAA
CAAGTGGTACTTCACCAGAGACTTCTGTAACATAGGCCTCTTCCAGCTCT
GGGCCACAGGCTTAGAACTCAGAAACCCCTGGCTCAGAATGAGCACCCTG
AGCCCCTGCATAGGCTTCAATGTCCTTAAAAACAGCATTTACACAAACCT
CAGCAACCTACCTCAGCACAGAGAAGACAGACTTAACATTATTAACAACA
CATTACACCCACATGACATAACAGGACCAAACAATAAAAAATGGCAGTAC
ACATATACCAAACTCATGGCCCCCATTTACTATTCAGCAAACAGGGCCAG
CACCTATGACTTACTACGAGAGTATGGCCTCTACAGTCCATACTACCTAA
ACCCCACAAGGATAAACCTTGACTGGATGACCCCCTACACACACGTCAGG
TACAATCCACTAGTAGACAAGGGCTTCGGAAACAGAATATACATACAGTG
GTGCTCAGAGGCAGATGTAAGCTACAACAGGACTAAATCCAAGTGTCTCT
TACAAGACATGCCCCTGTTTTTCATGTGCTATGGCTACATAGACTGGGCA
ATTAAAAACACAGGGGTCTCCTCACTAGCGAGAGACGCCAGAATCTGCAT
CAGGTGTCCCTACACAGAGCCACAGCTGGTGGGCTCCACAGAAGACATAG
GGTTCGTACCCATCACAGAGACCTTCATGAGGGGCGACATGCCGGTACTT
GCACCATACATACCGTTGAGCTGGTTTTGCAAGTGGTATCCCAACATAGC
TCACCAGAAGGAAGTACTTGAGGCAATCATTTCCTGCAGCCCCTTCATGC
CCCGTGACCAGGGCATGAACGGTTGGGATATTACAATAGGTTACAAAATG
GACTTCTTATGGGGCGGTTCCCCTCTCCCCTCACAGCCAATCGACGACCC
CTGCCAGCAGGGAACCCACCCGATTCCCGACCCCGATAAGCACCCTCGCC
TCCTACAAGTGTCGAACCCGAAACTGCTCGGACCGAGGACAGTGTTCCAC
AAGTGGGACATCAGACGTGGGCAGTTTAGCAAAAGAAGTATTAAAAGAGT
GTCAGAATACTCATCGGATGATGAATCTCTTGCGCCAGGTCTCCCATCAA
AGCGAAACAAGCTCGACTCGGCCTTCAGAGGAGAAAACCCAGAGCAAAAA
GAATGCTATTCTCTCCTCAAAGCACTCGAGGAAGAAGAGACCCCAGAAGA
AGAAGAACCAGCACCCCAAGAAAAAGCCCAGAAAGAGGAGCTACTCCACC
AGCTCCAGCTCCAGAGACGCCACCAGCGAGTCCTCAGACGAGGGCTCAAG
CTCGTCTTTACAGACATCCTCCGACTCCGCCAGGGAGTCCACTGGAACCC
CGAGCTCACATAGAGCCCCCACCTTACATACCAGACCTACTTTTTCCCAA
TACTGGTAAAAAAAAAAAATTCTCTCCCTTCGACTGGGAAACGGAGGCCC
AGCTAGCAGGGATATTCAAGCGTCCTATGCGCTTCTATCCCTCAGACACC
CCTCACTACCCGTGGTTACCCCCCAAGCGCGATATCCCGAAAATATGTAA
CATAAACTTCAAAATAAAGCTGCAAGAGTGAGTGATTCGAGGCCCTCCTC
TGTTCACTTAGCGGTGTCTACCTCTTAAAGTCACCAAGCACTCCGAGCGT
CAGCGAGGAGTGCGACCCTCCACCAAGGGGCAACTTCCTCGGGGTCCGGC
GCTACGCGCTTCGCGCTGCGCCGGACGCCTCGGACCCCCCCCCGACCCGA
ATCGCTCGCGCGATTCGGACCTGCGGCCTCGGGGGGGGTCGGGGGCTTTA
CTAAACAGACTCCGAGTTGCCACTGGACTCAGGAGCTGTGAATCAGTAAC
GAAAGTGAGTGGGGCCAGACTTCGCCATAGGGCCTTTAACTTGGGGTCGT
CTGTCGGTGGCTTCCGGGTCCGCCTGGGCGCCGCCATTTTAGCTTTAGAC
GCCATTTTAGGCCCTCGCGGGCACCCGTAGGCGCGTTTTAATGACGTCAC
GGCAGCCATTTTGTCGTGACGTTTGAGACACGTGATGGGGGCGTGCCTAA
ACCCGGAAGCATCCCTGGTCACGTGACTCTGACGTCACGGCGGCCATTTT
GTGCTGTCCGCCATCTTGTGACTTCCTTCCGCTTTTTCAAAAAAAAAGAG
GAAGTATGACAGTAGCGGCGGGGGGGCGGCCGCGTTCGCGCGCCGCCCAC
CAGGGGGTGCTGCGCGCCCCCCCCCGCGCATGCGCGGGGCCCCCCCCCGG
GGGGGCTCCGCCCCCCCGGCCCCCCCCCGTGCTAAACCCACCGCGCATGC
GCGACCACGCCCCCGCCGCC (SEQ ID NO: 1)
Annotations:
Putative Domain Base range
TATA BOX 84-90
Cap Site 107-114
Transcriptional Start Site 114
5' UTR Conserved Domain 177-247
ORF2 299-691
ORF2/2 299-687;
                                                                  2137-2659
ORF2/3 299-687;
                                                                  2339-2831
ORF2t/3 299-348;
                                                                  2339-2831
ORF1 571-2613
ORF1/1 571-687;
                                                                  2137-2613
ORF1/2 571-687;
                                                                  2339-2659
Three open-reading frame region 2325-2610
Poly(A) Signal 2813-2818
GC-rich region 3415-3570
```

TABLE 2
Exemplary Anellovirus amino acid sequences (Alphatorquevirus, Clade 1)

TTV-CT30F (Alphatorquevirus Clade 1)

| | |
|---|---|
| ORF2 | MPWRPPVHSVQGREDQWFASFFHGHASFCGCGDAVGHLNSIAPRFPRAGPPRPPPG |
| | LEQPNPPQQGPAGPGGPPAILALPAPPAEPDDPQPRRGGGDGGAAAGAAGDRGDRD |
| | YDEEELDELFRAAAEDDL (SEQ ID NO: 2) |
| ORF2/2 | MPWRPPVHSVQGREDQWFASFFHGHASFCGCGDAVGHLNSIAPRFPRAGPPRPPPG |
| | LEQPNPPQQGPAGPGGPPAILALPAPPAEPDDPQPRRGGGDGGAAAGAAGDRGDRD |
| | YDEEELDELFRAAAEDDFQSTTPASREPTRFPTPISTLASYKCRTRNCSDRGQCSTSG |
| | TSDVGSLAKEVLKECQNTHRMMNLLRQVSHQSETSSTRPSEEKTQSKKNAILSSKH |
| | SRKKRPQKKKNQHPKKKPRKRSYSTSSSSRDATSESSDEGSSSSLQTSSDSARESTGT |
| | PSSHRAPTLHTRPTFSQYW (SEQ ID NO: 3) |
| ORF2/3 | MPWRPPVHSVQGREDQWFASFFHGHASFCGCGDAVGHLNSIAPRFPRAGPPRPPPG |
| | LEQPNPPQQGPAGPGGPPAILALPAPPAEPDDPQPRRGGGDGGAAAGAAGDRGDRD |
| | YDEEELDELFRAAAEDDLSPIKAKQARLGLQRRKPRAKRMLFSPQSTRGRRDPRRR |
| | RTSTPRKSPERGATPPAPAPETPPASPQTRAQARLYRHPPTPPGSPLEPRAHIEPPPYIP |
| | DLLFPNTGKKKKFSPFDWETEAQLAGIFKRPMRFYPSDTPHYPWLPPKRDIPKICNIN |
| | FKIKLQE (SEQ ID NO: 4) |
| ORF2t/3 | MPWRPPVHSVQGREDQWSPIKAKQARLGLQRRKPRAKRMLFSPQSTRGRRDPRRR |
| | RTSTPRKSPERGATPPAPAPETPPASPQTRAQARLYRHPPTPPGSPLEPRAHIEPPPYIP |
| | DLLFPNTGKKKKFSPFDWETEAQLAGIFKRPMRFYPSDTPHYPWLPPKRDIPKICNIN |
| | FKIKLQE (SEQ ID NO: 5) |
| ORF1 | TAWWWGRWRRRWRRRRPWRPRLRRRRARRAFPRRRRRRFVSRRWRRPYRRRRR |
| | RGRRRRRRRRRHKPTLVLRQWQPDVIRHCKITGRMPLIICGKGSTQFNYITHADDIT |
| | PRGASYGGNFTNMTFSLEAIYEQFLYHRNRWSASNHDLELCRYKGTTLKLYRHPD |
| | VDYIVTYSRTGPFEISHMTYLSTHPLLMLLNKHHIVVPSLKTKPRGRKAIKVRIRPPK |
| | LMNNKWYFTRDFCNIGLFQLWATGLELRNPWLRMSTLSPCIGFNVLKNSIYTNLSN |
| | LPQHREDRLNIINNTLHPHDITGPNNKKWQYTYTKLMAPIYYSANRASTYDLLREY |
| | GLYSPYYLNPTRINLDWMTPYTHVRYNPLVDKGFGNRIYIQWCSEADVSYNRTKSK |
| | CLLQDMPLFFMCYGYIDWAIKNTGVSSLARDARICIRCPYTEPQLVGSTEDIGFVPIT |
| | ETFMRGDMPVLAPYIPLSWFCKWYPNIAHQKEVLEAIISCSPFMPRDQGMNGWDITI |
| | GYKMDFLWGGSPLPSQPIDDPCQQGTHPIPDPDKHPRLLQVSNPKLLGPRTVFHKW |
| | DIRRGQFSKRSIKRVSEYSSDDESLAPGLPSKRNKLDSAFRGENPEQKECYSLLKALE |
| | EEETPEEEEPAPQEKAQKEELLHQLQLQRRHQRVLRRGLKLVFTDILRLRQGVHWN |
| | PELT (SEQ ID NO: 6) |
| ORF1/1 | TAWWWGRWRRRWRRRRPWRPRLRRRRARRAFPRRRRRRFPIDDPCQQGTHPIPDP |
| | DKHPRLLQVSNPKLLGPRTVFHKWDIRRGQFSKRSIKRVSEYSSDDESLAPGLPSKR |
| | NKLDSAFRGENPEQKECYSLLKALEEEETPEEEEPAPQEKAQKEELLHQLQLQRRH |
| | QRVLRRGLKLVFTDILRLRQGVHWNPELT (SEQ ID NO: 7) |
| ORF1/2 | TAWWWGRWRRRWRRRRPWRPRLRRRRARRAFPRRRRRRFVSHQSETSSTRPSEE |
| | KTQSKKNAILSSKHSRKKRPQKKKNQHPKKKPRKRSYSTSSSSRDATSESSDEGSSS |
| | SLQTSSDSARESTGTPSSHRAPTLHTRPTFSQYW (SEQ ID NO: 8) |

TABLE 3
Exemplary Anellovirus nucleic acid sequence
(Alphatorquevirus, Clade 2)

Name TTV-TJN02
Genus/Clade Alphatorquevirus,
Clade 2
Accession Number AB028669.1
Full Sequence: 3794 bp
1 10 20 30 40 50
| | | | | |
CCCGAAGTCCGTCACTAACCACGTGACTCCTGTCGCCCAATCAGAGTGTA
TGTCGTGCATTTCCTGGGCATGGTCTACATCCTGATATAACTAAGTGCAC
TTCCGAATGGCTGAGTTTTCCACGCCCGTCCGCAGCGAGGGAGCGACGGA
GGAGCTCCCGAGCGTCCCGAGGGCGGGTGCCGGAGGTGAGTTTACACACC
GCAGTCAAGGGGCAATTCGGGCTCGGGACTGGCCGGGCTATGGGCAAGGC
TCTTAGGGTCTTCATTCTTAATATGTTTCTTGGCAGAGTTTACCGCCACA
AGAAAAGGAAAGTGCTACTGTCCACACTGCGAGCTCCACAGGCGTCTCGC
AGGGCTATGAGTTGGCGACCCCCGGTACACGATGCACCCGGCATCGAGCG
CAATTGGTACGAGGCCTGTTTCAGAGCCCACGCTGGAGCTTGTGGCTGTG
GCAATTTTATTATGCACCTTAATCTTTTGGCTGGGCGTTATGGTTTTACT
CCGGGGTCAGCGCCGCCAGGTGGTCCTCCTCCGGGCACCCCGCAGATAAG
GAGAGCCAGGCCTAGTCCCGCCGCACCAGAGCAGCCCGCTGCCCTACCAT
GGCATGGGGATGGTGGAGATGGCGGCGCCGCTGGCCCGCCAGACGCTGGA
GGAGACGCCGTCGCCGGCGCCCCGTACGGAGAACAAGAGCTCGCCGACCT
GCTCGACGCTATAGAAGACGACGAACAGTAAGAACCAGGCGAAGGCGGTG
GGGGCGCAGACGGTACAGACGGGGCTGGAGACGCAGGACTTATGTGAGAA
AGGGGCGACACAGAAAAAAGAAAAAGAGACTGATACTGAGACAGTGGCAA
CCAGCCACAAGACGCAGATGTACCATAACTGGGTACCTGCCCATAGTGTT
CTGCGGCCACACTAGGGGCAATAAAAACTATGCACTACACTCTGACGACT
ACACCCCCCAAGGACAACCATTTGGAGGGGCTCTAAGCACTACCTCATTC
TCTTTAAAAGTACTATTTGACCAGCATCAGAGAGGACTAAACAAGTGGTC
TTTTCCAAACGACCAACTAGACCTCGCCAGATATAGAGGCTGCAAATTTA
TATTTTATAGAACAAAACAAACTGACTGGGTGGGCCAGTATGACATATCA
GAACCCTACAAGCTAGACAAATACAGCTGCCCCAACTATCACCCTGGAAA
CATGATTAAGGCAAAGCACAAATTTTTAATACCAAGCTATGACACTAATC
CTAGAGGCAGACAAAAAATTATAGTTAAAATTCCCCCCCCAGACCTCTTT
GTAGACAAGTGGTACACTCAAGAGGATCTGTGTTCCGTTAATCTTGTGTC
ACTTGCGGTTTCTGCGGCTTCCTTTCTCCACCCATTCGGCTCACCACAAA
CTGACAACCCTTGCTACACCTTCCAGGTGTTGAAAGAGTTCTACTATCAG
GCAATAGGCTTCTCTGCAAGCACACAAGCAATGACATCAGTATTAGACAC
GCTATACACACAAAACAGTTATTGGGAATCTAATCTAACTCAGTTTTATG
TACTTAATGCAAAAAAAGGCAGTGATACAACACAGCCTTTAACTAGCAAT
ATGCCAACTCGTGAAGAGTTTATGGCAAAAAAAAATACCAATTACAACTG
GTATACATACAAGGCCGCGTCAGTAAAAAATAAACTACATCAAATGAGAC
AAACCTATTTTGAGGAGTTAACCTCTAAGGGGCCACAAACAACAAAAAGT
GAGGAAGGCTACAGTCAGCACTGGACCACCCCCTCCACAAACGCCTACGA
ATATCACTTAGGAATGTTTAGTGCAATATTTCTAGCCCCAGACAGGCCAG
TACCTAGATTTCCATGCGCCTACCAAGATGTAACTTACAACCCCTTAATG
GACAAAGGGGTGGGAAACCACATTTGGTTTCAGTACAACACAAAGGCAGA
CACTCAGCTAATAGTCACAGGAGGGTCCTGCAAAGCACACATACAAGACA
TACCACTGTGGGCGGCCTTCTATGGATACAGTGACTTTATAGAGTCAGAA
CTAGGCCCCTTTGTAGATGCAGAGACGGTAGGCTTAGTGTGTGTAATATG
CCCTTATACAAAACCCCCCATGTACAACAAGACAAACCCCGCCATGGGCT
ACGTGTTCTATGACAGAAACTTTGGTGACGGAAAATGGACTGACGGACGG
GGCAAAATAGAGCCCTACTGGCAAGTTAGGTGGAGGCCCGAAATGCTTTT
CCAAGAAACTGTAATGGCAGACCTAGTTCAGACTGGGCCCTTTAGCTACA
AAGACGAACTTAAAAACAGCACCCTAGTGTGCAAGTACAAATTCTATTTC
ACCTGGGGAGGTAACATGATGTTCCAACAGACGATCAAAAACCCGTGCAA
GACGGACGGACAACCCACCGACTCCAGTAGACACCCTAGAGGAATACAAG
TGGCGGACCCGGAACAAATGGGACCCCGCTGGGTGTTCCACTCCTTTGAC
TGGCGAAGGGGCTATCTTAGCGAGAAAGCTCTCAAACGCCTGCAAGAAAA
ACCTCTTGACTATGACGAATATTTTACACAACCAAAAAGACCTAGAATCT
TTCCTCCAACAGAATCAGCAGAGGGAGAGTTCCGAGAGCCCGAAAAAGGC
TCGTATTCAGAGGAAGAAAGGTCGCAAGCCTCTGCCGAAGAGCAGACGCA
GGAGGCGACAGTACTCCTCCTCAAGCGACGACTCAGAGAGCAACAGCAGC
TCCAGCAGCAGCTCCAATTCCTCACCCGAGAAATGTTCAAAACGCAAGCG
GGTCTCCACCTAAACCCTATGTTATTAAACCAGCGATAAACCAAGTGTAC
CTGTTTCCAGAGAGGGCCCCAAAACCCCCTCCTAGCAGCCAAGACTGGCA
GCAGGAGTACGAGGCCTGCGCAGCCTGGGACAGGCCCCCTAGATACAATC
TGTCCTCTCCTCCTTTCTACCCCAGCTGCCCTTCAAAATTCTGTGTAAAA
TTCAGCCTTGGCTTTAAATAAATGGCAACTTTACTGTGCAAGGCCGTGGG
AGTTTCACTGGTCGGTGTCTACCTCTAAAGGTCACTAAGCACTCCGAGCG
TTAGCGAGGAGTGCGACCCTTCCCCCTGACTCAACTTCTTCGGAGCCGCG
CGCTACGCCTTCGGCTGCGCGCGGCACCTCAGACCCCCGCTCGTGCTGAC
ACGCTCGCGCGTGTCAGACCACTTCGGGCTCGCGGGGGTCGGGAATTTTG
CTAAACAGACTCCGAGTTGCTCTTGGACACTGAGGGGGCATATCAGTAAC
GAAAGTGAGTGGGGCCAGACTTCGCCATAAGGCCTTTATCTTCTTGCCAT
TGGATAGTATCGAGGGTTGCCATAGGCTTCGACCTCCATTTTAGGCCTTC
CGGACTACAAAAATGGCCGTTTTAGTGACGTCACGGCCGCCATTTTAAGT
AAGGCGGAAGCAGCTCGGCGTACACAAAATGGCGGCGGAGCACTTCCGGC
TTGCCCAAAATGGTGGGCAACTTCTTCCGGGTCAAAGGTCACAGCTACGT
CACAAGTCACGTGGGGAGGGTTGGCGTTTAACCCGGAAGCCAATCCTCTT
ACGTGGCCTGTCACGTGACTTGTACGTCACGACCACCATTTTGTTTTACA
AAATGGCCGACTTCCTTCCTCTTTTTTAAAAATAACGGTTCGGCGGCGGC
GCGCGCGCTACGCGCGCGCGCCGGGGGGCTGCCGCCCCCCCCCCGCGCAT
GCGCGGGGCCCCCCCCCGCGGGGGGCTCCGCCCCCCGGCCCCCC
(SEQ ID NO: 9)
Annotations:
Putative Domain Base range
TATA Box 89-90
Cap Site 107-114
Transcriptional Start Site 114
5' UTR Conserved Domain 174-244
ORF2 357-731
ORF2/2 357-727; 2381-2813
ORF2/3 357-727; 2619-3021
ORF2t/3 357-406; 2619-3021
ORF1 599-2839
ORF1/1 599-727; 2381-2839
ORF1/2 599-727; 2619-2813
Three open-reading frame region 2596-2810
Poly(A) Signal 3017-3022
GC-rich region 3691-3794

TABLE 4
Exemplary Anellovirus amino acid sequences (Alphatorquevirus, Clade 2)

TTV-TJN0 (Alphatorquevirus Clade 2)

| | |
|---|---|
| ORF2 | MSWRPPVHDAPGIERNWYEACFRAHAGACGCGNFIMHLNLLAGRYGFTPGSAPPG |
| | GPPPGTPQIRRARPSPAAPEQPAALPWHGDGGDGGAAGPPDAGGDAVAGAPYGEQ |
| | ELADLLDAIEDDEQ (SEQ ID NO: 10) |
| ORF2/2 | MSWRPPVHDAPGIERNWYEACFRAHAGACGCGNFIMHLNLLAGRYGFTPGSAPPG |
| | GPPPGTPQIRRARPSPAAPEQPAALPWHGDGGDGGAAGPPDAGGDAVAGAPYGEQ |
| | ELADLLDAIEDDEQRSKTRARRTDNPPTPVDTLEEYKWRTRNKWDPAGCSTPLTGE |
| | GAILARKLSNACKKNLLTMTNILHNQKDLESFLQQNQQRESSESPKKARIQRKKGR |
| | KPLPKSRRRRRQYSSSSDDSESNSSSSSSSNSSPEKCSKRKRVST (SEQ ID NO: |
| | 11) |
| ORF2/3 | MSWRPPVHDAPGIERNWYEACFRAHAGACGCGNFIMHLNLLAGRYGFTPGSAPPG |
| | GPPPGTPQIRRARPSPAAPEQPAALPWHGDGGDGGAAGPPDAGGDAVAGAPYGEQ |
| | ELADLLDAIEDDEHRGRVPRARKRLVFRGRKVASLCRRADAGGDSTPPQATTQRAT |
| | AAPAAAPIPHPRNVQNASGSPPKPYVIKPAINQVYLFPERAPKPPPSQDWQQEYEA |
| | CAAWDRPPRYNLSSPPFYPSCPSKFCVKFSLGFK (SEQ ID NO: 12) |
| ORF2t/3 | MSWRPPVHDAPGIERNCRGRVPRARKRLVFRGRKVASLCRRADAGGDSTPPQATT |
| | QRATAAPAAAPIPHPRNVQNASGSPPKPYVIKPAINQVYLFPERAPKPPPSSQDWQQ |
| | EYEACAAWDRPPRYNLSSPPFYPSCPSKFCVKFSLGFK (SEQ ID NO: 13) |
| ORF1 | MAWGWWRWRRRWPARRWRRRRRRRPVRRTRARRPARRYRRRRTVRTRRRRWG |
| | RRRYRRGWRRRTYVRKGRHRKKKKRLILRQWQPATRRRCTITGYLPIVFCGHTRG |
| | NKNYALHSDDYTPQGQPFGGALSTTSFSLKVLFDQHQRGLNKWSFPNDQLDLARY |
| | RGCKFIFYRTKQTDWVGQYDISEPYKLDKYSCPNYHPGNMIKAKHKFLIPSYDTNP |
| | RGRQKIIVKIPPPDLFVDKWYTQEDLCSVNLVSLAVSAASFLHPFGSPQTDNPCYTF |
| | QVLKEFYYQAIGFSASTQAMTSVLDTLYTQNSYWESNLTQFYVLNAKKGSDTTQPL |
| | TSNMPTREEFMAKKNTNYNWYTYKAASVKNKLHQMRQTYFEELTSKGPQTTKSE |
| | EGYSQHWTTPSTNAYEYHLGMFSAIFLAPDRPVPRFPCAYQDVTYNPLMDKGVGN |
| | HIWFQYNTKADTQLIVTGGSCKAHIQDIPLWAAFYGYSDFIESELGPFVDAETVGLV |
| | CVICPYTKPPMYNKTNPAMGYVFYDRNFGDGKWTDGRGKIEPYWQVRWRPEMLF |
| | QETVMADLVQTGPFSYKDELKNSTLVCKYKFYFTWGGNMMFQQTIKNPCKTDGQ |
| | PTDSSRHPRGIQVADPEQMGPRWVFHSFDWRRGYLSEKALKRLQEKPLDYDEYFT |
| | QPKRPRIFPPTESAEGEFREPEKGSYSEEERSQASAEEQTQEATVLLLKRRLREQQQL |
| | QQQLQFLTREMFKTQAGLHLNPMLLNQR (SEQ ID NO: 14) |
| ORF1/1 | MAWGWWRWRRRWPARRWRRRRRRRPVRRTRARRPARRYRRRRTTIKNPCKTDG |
| | QPTDSSRHPRGIQVADPEQMGPRWVFHSFDWRRGYLSEKALKRLQEKPLDYDEYF |
| | TQPKRPRIFPPTESAEGEFREPEKGSYSEEERSQASAEEQTQEATVLLLKRRLREQQQ |
| | LQQQLQFLTREMFKTQAGLHLNPMLLNQR (SEQ ID NO: 15) |
| ORF1/2 | MAWGWWRWRRRWPARRWRRRRRRRPVRRTRARRPARRYRRRRTQRESSESPKK |
| | ARIQRKKGRKPLPKSRRRRRQYSSSSDDSESNSSSSSSSNSSPEKCSKRKRVST |
| | (SEQ ID NO: 16) |

TABLE 5
Exemplary Anellovirus nucleic acid sequence
(Alphatorquevirus, Clade 3)

```
Name TTV-tth8
Genus/Clade Alphatorquevirus,
                                                          Clade 3
Accession Number AJ620231.1
Full Sequence: 3753 bp
1 10 20 30 40 50
| | | | | |
TGCTACGTCACTAACCCACGTGTCCTCTACAGGCCAATCGCAGTCTATGT
CGTGCACTTCCTGGGCATGGTCTACATAATTATATAAATGCTTGCACTTC
CGAATGGCTGAGTTTTTGCTGCCCGTCCGCGGAGAGGAGCCACGGCAGGG
GATCCGAACGTCCTGAGGGCGGGTGCCGGAGGTGAGTTTACACACCGAAG
TCAAGGGGCAATTCGGGCTCAGGACTGGCCGGGCTTTGGGCAAGGCTCTT
AAAAATGCACTTTTCTCGAATAAGCAGAAAGAAAAGGAAAGTGCTACTGC
TTTGCGTGCCAGCAGCTAAGAAAAAACCAACTGCTATGAGCTTCTGGAAA
CCTCCGGTACACAATGTCACGGGGATCCAACGCATGTGGTATGAGTCCTT
TCACCGTGGCCACGCTTCTTTTTGTGGTTGTGGGAATCCTATACTTCACA
TTACTGCACTTGCTGAAACATATGGCCATCCAACAGGCCCGAGACCTTCT
GGGCCACCGGGAGTAGACCCCAACCCCCACATCCGTAGAGCCAGGCCTGC
CCCGGCCGCTCCGGAGCCCTCACAGGTTGATTCGAGACCAGCCCTGACAT
GGCATGGGGATGGTGGAAGCGACGGAGGCGCTGGTGGTTCCGGAAGCGGT
GGACCCGTGGCAGACTTCGCAGACGATGGCCTCGATCAGCTCGTCGCCGC
CCTAGACGACGAAGAGTAAGGAGGCGCAGACGGTGGAGGAGGGGGAGACG
AAAAACAAGGACTTACAGACGCAGGAGACGCTTTAGACGCAGGGGACGAA
AAGCAAAACTTATAATAAAACTGTGGCAACCTGCAGTAATTAAAAGATGC
AGAATAAAGGGATACATACCACTGATTATAAGTGGGAACGGTACCTTTGC
CACAAACTTTACCAGTCACATAAATGACAGAATAATGAAAGGCCCCTTCG
GGGGAGGACACAGCACTATGAGGTTCAGCCTCTACATTTTGTTTGAGGAG
CACCTCAGACACATGAACTTCTGGACCAGAAGCAACGATAACCTAGAGCT
AACCAGATACTTGGGGGCTTCAGTAAAAATATACAGGCACCCAGACCAAG
ACTTTATAGTAATATACAACAGAAGAACCCCTCTAGGAGGCAACATCTAC
ACAGCACCCTCTCTACACCCAGGCAATGCCATTTTAGCAAAACACAAAAT
ATTAGTACCAAGTTTACAGACAAGACCAAAGGGTAGAAAAGCAATTAGAC
TAAGAATAGCACCCCCCACACTCTTTACAGACAAGTGGTACTTTCAAAAG
GACATAGCCGACCTCACCCTTTTCAACATCATGGCAGTTGAGGCTGACTT
GCGGTTTCCGTTCTGCTCACCACAAACTGACAACACTTGCATCAGCTTCC
AGGTCCTTAGTTCCGTTTACAACAACTACCTCAGTATTAATACCTTTAAT
AATGACAACTCAGACTCAAAGTTAAAAGAATTTTTAAATAAAGCATTTCC
AACAACAGGCACAAAAGGAACAAGTTTAAATGCACTAAATACATTTAGAA
CAGAAGGATGCATAAGTCACCCACAACTAAAAAAACCAAACCCACAAATA
AACAAACCATTAGAGTCACAATACTTTGCACCTTTAGATGCCCTCTGGGG
AGACCCCATATACTATAATGATCTAAATGAAAACAAAAGTTTGAACGATA
TCATTGAGAAAATACTAATAAAAAACATGATTACATACCATGCAAAACTA
AGAGAATTTCCAAATTCATACCAAGGAAACAAGGCCTTTTGCCACCTAAC
AGGCATATACAGCCCACCATACCTAAACCAAGGCAGAATATCTCCAGAAA
TATTTGGACTGTACACAGAAATAATTTACAACCCTTACACAGACAAAGGA
ACTGGAAACAAAGTATGGATGGACCCACTAACTAAAGAGAACAACATATA
TAAAGAAGGACAGAGCAAATGCCTACTGACTGACATGCCCCTATGGACTT
TACTTTTTGGATATACAGACTGGTGTAAAAAGGACACTAATAACTGGGAC
TTACCACTAAACTACAGACTAGTACTAATATGCCCTTATACCTTTCCAAA
ATTGTACAATGAAAAAGTAAAAGACTATGGGTACATCCCGTACTCCTACA
AATTCGGAGCGGGTCAGATGCCAGACGGCAGCAACTACATACCCTTTCAG
TTTAGAGCAAAGTGGTACCCCACAGTACTACACCAGCAACAGGTAATGGA
GGACATAAGCAGGAGCGGGCCCTTTGCACCTAAGGTAGAAAAACCAAGCA
CTCAGCTGGTAATGAAGTACTGTTTTAACTTTAACTGGGGCGGTAACCCT
ATCATTGAACAGATTGTTAAAGACCCCAGCTTCCAGCCCACCTATGAAAT
ACCCGGTACCGGTAACATCCCTAGAAGAATACAAGTCATCGACCCGCGGG
TCCTGGGACCGCACTACTCGTTCCGGTCATGGGACATGCGCAGACACACA
TTTAGCAGAGCAAGTATTAAGAGAGTGTCAGAACAACAAGAAACTTCTGA
CCTTGTATTCTCAGGCCCAAAAAAGCCTCGGGTCGACATCCCAAAACAAG
AAACCCAAGAAGAAAGCTCACATTCACTCCAAAGAGAATCGAGACCGTGG
GAGACCGAGGAAGAAAGCGAGACAGAAGCCCTCTCGCAAGAGAGCCAAGA
GGTCCCCTTCCAACAGCAGTTGCAGCAGCAGTACCAAGAGCAGCTCAAGC
TCAGACAGGGAATCAAAGTCCTCTTCGAGCAGCTCATAAGGACCCAACAA
GGGGTCCATGTAAACCCATGCCTACGGTAGGTCCCAGGCAGTGGCTGTTT
CCAGAGAGAAAGCCAGCCCCAGCTCCTAGCAGTGGAGACTGGGCCATGGA
GTTTCTCGCAGCAAAAATATTTGATAGGCCAGTTAGAAGCAACCTTAAAG
ATACCCCTTACTACCCATATGTTAAAAACCAATACAATGTCTACTTTGAC
CTTAAATTTGAATAAACAGCAGCTTCAAACTTGCAAGGCCGTGGGAGTTT
CACTGGTCGGTGTCTACCTCTAAAGGTCACTAAGCACTCCGAGCGTAAGC
GAGGAGTGCGACCCTCCCCCCTGGAACAACTTCTTCGGAGTCCGGCGCTA
CGCCTTCGGCTGCGCCGGACACCTCAGACCCCCCCTCCACCCGAAACGCT
TGCGCGTTTCGGACCTTCGGCGTCGGGGGGGTCGGGAGCTTTATTAAACG
GACTCCGAAGTGCTCTTGGACACTGAGGGGGTGAACAGCAACGAAAGTGA
GTGGGGCCAGACTTCGCCATAAGGCCTTTATCTTCTTGCCATTTGTCAGT
GTCCGGGGTCGCCATAGGCTTCGGGCTCGTTTTTAGGCCTTCCGGACTAC
AAAAATCGCCATTTTGGTGACGTCACGGCCGCCATCTTAAGTAGTTGAGG
CGGACGGTGGCGTGAGTTCAAAGGTCACCATCAGCCACACCTACTCAAAA
TGGTGGACAATTTCTTCCGGGTCAAAGGTTACAGCCGCCATGTTAAAACA
CGTGACGTATGACGTCACGGCCGCCATTTTGTGACACAAGATGGCCGACT
TCCTTCCTCTTTTTCAAAAAAAAGCGGAAGTGCCGCCGCGGCGGCGGGGG
GCGGCGCGCTGCGCGCGCCGCCCAGTAGGGGGAGCCATGCGCCCCCCCCC
GCGCATGCGCGGGGCCCCCCCCCGCGGGGGGCTCCGCCCCCCGGCCCCCC
CCG (SEQ ID NO: 17)
Annotations:
Putative Domain Base range
TATA Box 83-88
Cap Site 104-111
Transcriptional Start Site 111
5' UTR Conserved Domain 170-240
ORF2 336-719
ORF2/2 336-715;
                                                                    2363-2789
ORF2/3 336-715;
                                                                    2565-3015
ORF2t/3 336-388;
                                                                    2565-3015
ORF1 599-2830
ORF1/1 599-715;
                                                                    2363-2830
ORF1/2 599-715;
                                                                    2565-2789
Three open-reading frame region 2551-2786
Poly(A) Signal 3011-3016
GC-rich region 3632-3753
```

TABLE 6
Exemplary Anellovirus amino acid sequences
(Alphatorquevirus, Clade 3)

TTV-tth8 (Alphatorquevirus Clade 3)

| ORF2 | MSFWKPPVHNVTGIQRMWYESFHRGHASFCGCGNPILHITALAETYGHPTGPRPSG |
|---|---|
| | PPGVDPNPHIRRARPAPAAPEPSQVDSRPALTWHGDGGSDGGAGGSGSGGPVADFA |
| | DDGLDQLVAALDDEE (SEQ ID NO: 18) |
| ORF2/2 | MSFWKPPVHNVTGIQRMWYESFHRGHASFCGCGNPILHITALAETYGHPTGPRPSG |
| | PPGVDPNPHIRRARPAPAAPEPSQVDSRPALTWHGDGGSDGGAGGSGSGGPVADFA |
| | DDGLDQLVAALDDEELLKTPASSPPMKYPVPVTSLEEYKSSTRGSWDRTTRSGHGT |
| | CADTHLAEQVLRECQNNKKLLTLYSQAQKSLGSTSQNKKPKKKAHIHSKENRDRG |
| | RPRKKARQKPSRKRAKRSPSNSSCSSSTKSSSSSDRESKSSSSSS (SEQ ID NO: |
| | 19) |
| ORF2/3 | MSFWKPPVHNVTGIQRMWYESFHRGHASFCGCGNPILHITALAETYGHPTGPRPSG |
| | PPGVDPNPHIRRARPAPAAPEPSQVDSRPALTWHGDGGSDGGAGGSGSGGPVADFA |
| | DDGLDQLVAALDDEEPKKASGRHPKTRNPRRKLTFTPKRIETVGDRGRKRDRSPLA |
| | REPRGPLPTAVAAAVPRAAQAQTGNQSPLRAAHKDPTRGPCKPMPTVGPRQWLFP |
| | ERKPAPAPSSGDWAMEFLAAKIFDRPVRSNLKDTPYYPYVKNQYNVYFDLKFE |
| | (SEQ ID NO: 20) |
| ORF2t/3 | MSFWKPPVHNVTGIQRMWPKKASGRHPKTRNPRRKLTFTPKRIETVGDRGRKRDR |
| | SPLAREPRGPLPTAVAAAVPRAAQAQTGNQSPLRAAHKDPTRGPCKPMPTVGPRQ |
| | WLFPERKPAPAPSSGDWAMEFLAAKIFDRPVRSNLKDTPYYPYVKNQYNVYFDLK |
| | FE (SEQ ID NO: 21) |
| ORF1 | MAWGWWKRRRRWWFRKRWTRGRLRRRWPRSARRRPRRRRVRRRRRWRRGRRK |
| | TRTYRRRRRFRRRGRKAKLIIKLWQPAVIKRCRIKGYIPLIISGNGTFATNFTSHINDR |
| | IMKGPFGGGHSTMRFSLYILFEEHLRHMNFWTRSNDNLELTRYLGASVKIYRHPDQ |
| | DFIVIYNRRTPLGGNIYTAPSLHPGNAILAKHKILVPSLQTRPKGRKAIRLRIAPPTLFT |
| | DKWYFQKDIADLTLFNIMAVEADLRFPFCSPQTDNTCISFQVLSSVYNNYLSINTFN |
| | NDNSDSKLKEFLNKAFPTTGTKGTSLNALNTFRTEGCISHPQLKKPNPQINKPLESQ |
| | YFAPLDALWGDPIYYNDLNENKSLNDIIEKILIKNMITYHAKLREFPNSYQGNKAFC |
| | HLTGIYSPPYLNQGRISPEIFGLYTEIIYNPYTDKGTGNKVWMDPLTKENNIYKEGQS |
| | KCLLTDMPLWTLLFGYTDWCKKDTNNWDLPLNYRLVLICPYTFPKLYNEKVKDY |
| | GYIPYSYKFGAGQMPDGSNYIPFQFRAKWYPTVLHQQQVMEDISRSGPFAPKVEKP |
| | STQLVMKYCFNFNWGGNPIIEQIVKDPSFQPTYEIPGTGNIPRRIQVIDPRVLGPHYSF |
| | RSWDMRRHTFSRASIKRVSEQQETSDLVFSGPKKPRVDIPKQETQEESSHSLQRESR |
| | PWETEEESETEALSQESQEVPFQQQLQQQYQEQLKLRQGIKVLFEQLIRTQQGVHV |
| | NPCLR (SEQ ID NO: 22) |
| ORF1/1 | MAWGWWKRRRRWWFRKRWTRGRLRRRWPRSARRRPRRRRIVKDPSFQPTYEIPG |
| | TGNIPRRIQVIDPRVLGPHYSFRSWDMRRHTFSRASIKRVSEQQETSDLVFSGPKKPR |
| | VDIPKQETQEESSHSLQRESRPWETEEESETEALSQESQEVPFQQQLQQQYQEQLKL |
| | RQGIKVLFEQLIRTQQGVHVNPCLR (SEQ ID NO: 23) |
| ORF1/2 | MAWGWWKRRRRWWFRKRWTRGRLRRRWPRSARRRPRRRRAQKSLGSTSQNKK |
| | PKKKAHIHSKENRDRGRPRKKARQKPSRKRAKRSPSNSSCSSSTKSSSSSDRESKSSS |
| | SSS (SEQ ID NO: 24) |

TABLE 7
Exemplary Anellovirus nucleic acid sequence
(Alphatorquevirus, Clade 4)

Name TTV-JA20
Genus/Clade Alphatorquevirus, Clade 4
Accession Number AF122914.3
Full Sequence: 3853 bp
(SEQ ID NO: 25)
1 10 20 30 40 50
| | | | | |
GGCTTAGTGCGTCACCACCCACGTGACCCGCCTCCGCCAATTAACAGGTA
CTTCGTACACTTCCTGGGCGGGCTTATAAGACTAATATAAGTAGCTGCAC
TTCCGAATGGCTGAGTTTTCCACGCCCGTCCGCAGCGGTGAAGCCACGGA
GGGAGCTCAGCGCGTCCCGAGGGCGGGTGCCGGAGGTGAGTTTACACACC
GCAGTCAAGGGGCAATTCGGGCTCGGGACTGGCCGGGCTTTGGGCAAGGC
TCTTAAAAAAGCTATGTTTATTGGCAGGCACTACCGAAAGAAAAGGGCGC
TGCTACTGCTATCTGTGCATTCTACAAAGACAAAAGGGAAACTTCTAATA
GCTATGTGGACTCCCCCACGCAATGATCAACAATACCTTAACTGGCAATG
GTACACTTCTGTACTTAGCTCCCACTCTGCTATGTGCGGGTGTTCCGACG
CTATCGCTCATCTTAATCATCTTGCTAATCTGCTTCGTGCCCCGCAAAAT
CCGCCCCCGCCTGATAATCCAAGACCCCTACCCGTGCGAGCACTGCCTGC
TCCCCCGGCTGCCCACGAGGCAGCCGGTGATCGAGCACCATGGCCTATGG
GTGGTGGAGGAGACGCCGGAGGCGCTGGCGCAGGTGGAGACGCCGACCAT
GGAGGCGCCGCTGGAGGACCCGCAGACGCAGACCTGCTAGACGCCGTGGC
CGCCGCAGAAACGTAAGGAGACGGCGCAGAGGGAGGTGGAGAAGGAGGTA
CAGGAGGTGGAAAAGAAAGGGCAGACGTAGAAGAAAAGCAAAAATAATAA
TAAGACAGTGGCAGCCAAACTACAGAAGAAGATGTAATATAGTGGGCTAC
CTCCCTATACTTATCTGTGGTGGAAATACTGTTTCTAGAAACTATGCCAC
ACACTCAGACGATACTAACTATCCAGGACCCTTTGGGGGAGGCATGACCA
CAGACAAATTCAGCCTTAGAATACTATATGATGAATACAAAAGATTTATG
AACTACTGGACAGCCTCAAATGAGGACCTAGATCTCTGTAGATATCTAGG
ATGCACTTTTTACTTCTTTAGACACCCTGAAGTAGACTTTATTATAAAAA
TAAACACCATGCCCCCATTCTTAGATACAACCATAACAGCACCTAGCATA
CACCCAGGCCTCATGGCCCTAGACAAAAGAGCCAGATGGATTCCTTCTCT
TAAAAATAGACCAGGTAAAAAACACTATATAAAAATTAGAGTAGGGGCTC
CTAAAATGTTCACAGATAAATGGTACCCTCAAACAGACCTCTGTGACATG
ACACTGCTAACTATCTATGCAACCGCAGCGGATATGCAATATCCGTTCGG
CTCACCACTAACTGACACTGTGGTTGTTAACTCCCAAGTTCTGCAATCCA
TGTATGATGAAACAATTAGCATATTACCTGATGAAAAAACTAAAAGAAAT
AGCCTTCTTACTTCTATAAGAAGCTACATACCTTTTTATAATACTACACA
AACAATAGCTCAATTAAAACCATTTGTAGATGCAGGAGGACACACAACAG
GCTCAACAACAACTACATGGGGACAACTATTAAACACAACTAAATTTACC
ACTACCACAACAACCACATACACATACCCTGGCACCACAAATACAGCAGT
AACATTTATAACAGCCAATGATACCTGGTACAGGGGAACAGCATATAAAG
ATAACATTAAAGATGTACCACAAAAAGCAGCACAATTATACTTTCAAACA
ACACAAAAACTACTAGGAAACACATTCCATGGCTCAGATGAAACACTTGA
ATACCATGCAGGCCTATACAGCTCTATCTGGCTATCACCAGGTAGATCCT
ACTTTGAAACACCAGGTGCATACACAGACATTAAATATAACCCTTTTACA
GACAGAGGAGAAGGCAACATGCTGTGGATAGACTGGCTAAGTAAAAAAAA
CATGAAATATGACAAAGTGCAAAGTAAGTGCCTAGTAGCAGACCTACCAC
TGTGGGCAGCAGCATATGGTTATGTAGAATTCTGCTCTAAAAGCACAGGA
GACACAAACATACACATGAATGCCAGACTACTAATAAGAAGTCCTTTTAC
AGACCCCCAGCTAATAGTACACACAGACCCCACTAAAGGCTTTGTACCCT
ATTCTTTAAACTTTGGAAATGGTAAAATGCCAGGAGGTAGCAGCAATGTT
CCCATAAGAATGAGAGCTAAGTGGTACCCCACTTTATCCCACCAACAAGA
AGTTCTAGAGGCCTTAGCACAGTCAGGACCCTTTGCTTATCACTCAGACA
TTAAAAAAGTATCTCTAGGCATAAAATACCGTTTTAAGTGGATCTGGGGT
GGAAACCCCGTTCGCCAACAGGTTGTTAGAAATCCCTGCAAGGAACCCCA
CTCCTCGGGCAATAGAGTCCCTAGAAGCATACAAATCGTTGACCCGAGAT
ACAACTCACCGGAACTTACCATCCATGCCTGGGACTTCAGACGTGGCTTC
TTTGGCCCGAAAGCTATTCAAAGAATGCAACAACAACCAACTGCTACTGA
ATTTTTTTCAGCAGGCCGCAAGAGACCCAGAAGGGACACAGAAGTGTATC
AGTCCGACCAAGAAAAGGAGCAAAAAGAAAGCTCGCTTTTCCCCCCAGTC
AAGCTCCTCCGAAGAGTCCCCCCGTGGGAGGACTCGGAACAGGAGCAAAG
CGGGTCGCAAAGCTCAGAGGAAGAGACGGCGACCCTCTCCCAGCAGCTCA
AACAGCAGCTGCAGCAGCAGCGAGTCTTGGGAGTCAAACTCAGACTCCTG
TTCAACCAAGTCCAAAAAATCCAACAAAATCAAGATATCAACCCTACCTT
GTTACCAAGGGGGGGGGATCTAGTATCCTTCTTTCAGGCTGTACCATAAA
TATGTTTCCAGACCCTAAACCTTACTGCCCCTCCAGCAATGACTGGAAAG
AAGAGTATGAGGCCTGTAAATATTGGGATAGACCTCCCAGACACAACCTT
AGAGACCCCCCCTTTTACCCCTGGGCCCCTAAAAACAATCCTTGCAATGT
AAGCTTTAAACTTGGCTTCAAATAAACTAGGCCGTGGGAGTTTCACTTGT
CGGTGTCTACCTCTATAAGTCACTAAGCACTCCGAGCGCAGCGAGGAGTG
CGACCCTTCCCCCTGGTGCAACGCCCTCGGCGGCCGCGCGCTACGCCTTC
GGCTGCGCGCGGCACCTCGGACCCCCGCTCGTGCTGACACGCTTGCGCGT
GTCAGACCACTTCGGGCTCGCGGGGGTCGGGAAATTTGCTAAACAGACTC
CGAGTTGCCATTGGACACTGTAGCTATGAATCAGTAACGAAAGTGAGTGG
GGCCAGACTTCGCCATAAGGCCTTTATCTTCTTGCCATTTGTCAGTATTG
GGGGTCGCCATAAACTTTGGGCTCCATTTTAGGCCTTCCGGACTACAAAA
ATCGCCATATTTGTGACGTCAGAGCCGCCATTTTAAGTCAGCTCTGGGGA
GGCGTGACTTCCAGTTCAAAGGTCATCCTCACCATAACTGGCACAAAATG
GCCGCCAACTTCTTCCGGGTCAAAGGTCACTGCTACGTCATAGGTGACGT
GGGGGGGGACCTACTTAAACACGGAAGTAGGCCCCGACACGTCACTGTCA
CGTGACAGTACGTCACAGCCGCCATTTTGTTTTACAAAATAGCCGACTTC
CTTCCTCTTTTTTAAAAAAAGGCGCCAAAAAACCGTCGGCGGGGGGGCCG
CGCGCTGCGCGCGCGGCCCCCGGGGGAGGCACAGCCTCCCCCCCCCGCGC
GCATGCGCGCGGGTCCCCCCCCCTCCGGGGGGCTCCGCCCCCCGGCCCCC
CCC
Annotations:
Putative Domain Base range
TATA Box 86-90
Cap Site 107-114
Transcriptional Start Site 114
5' UTR Conserved Domain 174-244
ORF2 354-716
0RF2/2 354-712; 2372-2873
0RF2/3 354-712; 2565-3075
ORF2t/3 354-400; 2565-3075
ORF1 590-2899
ORF1/1 590-712; 2372-2899
ORF1/2 590-712; 2565-2873
Three open-reading frame region 2551-2870
Poly(A) Signal 3071-3076
GC-rich region 3733-3853

TABLE 8
Exemplary Anellovirus amino acid sequences (Alphatorquevirus,
Clade 4) TTV-JA20 (Alphatorquevirus Clade 4)

(SEQ ID NO: 26)

| | |
|---|---|
| ORF2 | MWTPPRNDQQYLNWQWYTSVLSSHSAMCGCSDAIAHLNHLANLLRAPQNPPPPD |
| | NPRPLPVRALPAPPAAHEAAGDRAPWPMGGGGDAGGAGAGGDADHGGAAGGPA |
| | DADLLDAVAAAET |

(SEQ ID NO: 27)

| | |
|---|---|
| ORF2/2 | MWTPPRNDQQYLNWQWYTSVLSSHSAMCGCSDAIAHLNHLANLLRAPQNPPPPD |
| | NPRPLPVRALPAPPAAHEAAGDRAPWPMGGGGDAGGAGAGGDADHGGAAGGPA |
| | DADLLDAVAAAETLLEIPARNPTPRAIESLEAYKSLTRDTTHRNLPSMPGTSDVASL |
| | ARKLFKECNNNQLLLNFFQQAARDPEGTQKCISPTKKRSKKKARFSPQSSSSEESPR |
| | GRTRNRSKAGRKAQRKRRRPSPSSSNSSCSSSESWESNSDSCSTKSKKSNKIKISTLP |
| | CYQGGGI |

(SEQ ID NO: 28)

| | |
|---|---|
| ORF2/3 | MWTPPRNDQQYLNWQWYTSVLSSHSAMCGCSDAIAHLNHLANLLRAPQNPPPPD |
| | NPRPLPVRALPAPPAAHEAAGDRAPWPMGGGGDAGGAGAGGDADHGGAAGGPA |
| | DADLLDAVAAAETPQETQKGHRSVSVRPRKGAKRKLAFPPSQAPPKSPPVGGLGTG |
| | AKRVAKLRGRDGDPLPAAQTAAAAAASLGSQTQTPVQPSPKNPTKSRYQPYLVTK |
| | GGGSSILLSGCTINMFPDPKPYCPSSNDWKEEYEACKYWDRPPRHNLRDPPFYPWA |
| | PKNNPCNVSFKLGFK |

(SEQ ID NO: 29)

| | |
|---|---|
| ORF2t/3 | MWTPPRNDQQYLNWQWPQETQKGHRSVSVRPRKGAKRKLAFPPSQAPPKSPPVG |
| | GLGTGAKRVAKLRGRDGDPLPAAQTAAAAAASLGSQTQTPVQPSPKNPTKSRYQP |
| | YLVTKGGGSSILLSGCTINMFPDPKPYCPSSNDWKEEYEACKYWDRPPRHNLRDPP |
| | FYPWAPKNNPCNVSFKLGFK |

(SEQ ID NO: 30)

| | |
|---|---|
| ORF1 | MAYGWWRRRRRRWRRWRRRPWRRRWRTRRRRPARRRGRRRNVRRRRRGRWRR |
| | RYRRWKRKGRRRRKAKIIIRQWQPNYRRRCNIVGYLPILICGGNTVSRNYATHSDD |
| | TNYPGPFGGGMTTDKFSLRILYDEYKRFMNYWTASNEDLDLCRYLGCTFYFFRHPE |
| | VDFIIKINTMPPFLDTTITAPSIHPGLMALDKRARWIPSLKNRPGKKHYIKIRVGAPK |
| | MFTDKWYPQTDLCDMTLLTIYATAADMQYPFGSPLTDTVVVNSQVLQSMYDETISI |
| | LPDEKTKRNSLLTSIRSYIPFYNTTQTIAQLKPFVDAGGHTTGSTTTTWGQLLNTTKF |
| | TTTTTTTYTYPGTTNTAVTFITANDTWYRGTAYKDNIKDVPQKAAQLYFQTTQKLL |
| | GNTFHGSDETLEYHAGLYSSIWLSPGRSYFETPGAYTDIKYNPFTDRGEGNMLWID |
| | WLSKKNMKYDKVQSKCLVADLPLWAAAYGYVEFCSKSTGDTNIHMNARLLIRSPF |
| | TDPQLIVHTDPTKGFVPYSLNFGNGKMPGGSSNVPIRMRAKWYPTLSHQQEVLEAL |
| | AQSGPFAYHSDIKKVSLGIKYRFKWIWGGNPVRQQVVRNPCKEPHSSGNRVPRSIQI |
| | VDPRYNSPELTIHAWDFRRGFFGPKAIQRMQQQPTATEFFSAGRKRPRRDTEVYQS |
| | DQEKEQKESSLFPPVKLLRRVPPWEDSEQEQSGSQSSEEETATLSQQLKQQLQQQR |
| | VLGVKLRLLFNQVQKIQQNQDINPTLLPRGGDLVSFFQAVP |

(SEQ ID NO: 31)

| | |
|---|---|
| ORF1/1 | MAYGWWRRRRRRWRRWRRRPWRRRWRTRRRRPARRRGRRRNVVRNPCKEPHSS |
| | GNRVPRSIQIVDPRYNSPELTIHAWDFRRGFFGPKAIQRMQQQPTATEFFSAGRKRP |
| | RRDTEVYQSDQEKEQKESSLFPPVKLLRRVPPWEDSEQEQSGSQSSEEETATLSQQL |
| | KQQLQQQRVLGVKLRLLFNQVQKIQQNQDINPTLLPRGGDLVSFFQAVP |

(SEQ ID NO: 32)

| | |
|---|---|
| ORF1/2 | MAYGWWRRRRRRWRRWRRRPWRRRWRTRRRRPARRRGRRRNAARDPEGTQKCI |
| | SPTKKRSKKKARFSPQSSSSEESPRGRTRNRSKAGRKAQRKRRRPSPSSSNSSCSSSE |
| | SWESNSDSCSTKSKKSNKIKISTLPCYQGGGI |

TABLE 9
Exemplary Anellovirus nucleic acid sequence
(Alphatorquevirus, Clade 5)

Name TTV-HD23a
Genus/Clade Alphatorquevirus, Clade 5
Accession Number FR751500.1
Full Sequence: 3758 bp
(SEQ ID NO: 33)
1 10 20 30 40 50
| | | | | |
AAAGTACGTCACTAACCACGTGACTCCCACAGGCCAACCACAGTCTACGT
CGTGCATTTCCTGGGCATGGTCTACATCATAATATAAGAAGGCGCACTTC
CGAATGGCTGAGTTTTCCACGCCCGTCCGCAGCGAGAACGCCACGGAGGG
AGATCCTCGCGTCCCGAGGGCGGGTGCCGGAGGTGAGTTTACACACCGCA
GTCAAGGGGCAATTCGGGCTCGGGACTGGCCGGGCCCTGGGCAAGGCTCT
TAAAAAATGCGCTTTCGCAGGGTTGCGGAGAAAAGGAAAGTGCTTCTGCA
AACTCTGCGAGCTGCAAAGCAGGCTAGGCGGCTTCTAGGTATGTGGCAGC
CCCCCGCGCACAATGTCCCCGGCATCGAGAGAAACTGGTACGAGAGCTGC
TTCAGGTCTCACGCTGCTGTTTGTGGCTGTGGCGACTTTGTTGGCCATAT
TAATCATTTGGCAACTACTCTGGGTCGTCCTCCGCGTCCTGGGCCCCCAG
GCGGACCCCGCACGCCGCAAATAAGAAACCTGCCAGCGCTCCCGGCGCCC
CAGGGCGAGCCCGGTGACAGAGCGCCATGGCGTGGGGTTTCTGGGGCCGA
CGCCGCCGGTGGAGACGGTGGAGAGCGCGGCGCAGACGGTGGAGACCCCG
GAGACGTAGGAGACGACGCCCTGCTCGCCGCTTTCGAGCTCGTCGAAGAG
TAAGGAGACGCGGGGGGAGGTGGCGCAGACGCTACAGAAAATGGCGACGG
GGCAGACGCAGACGGACTCACAGAAAAAAGATAATTATAAAACAGTGGCA
ACCAAACTTTATTAGACGCTGCTACATAATAGGATGCCTACCTCTCGTTT
TCTGTGGCGAAAATACAACCGCCCAGAACTATGCCACTCACTCAGACGAT
ATGATAAGCAAAGGACCGTACGGGGGGGGCATGACTACCACGAAATTCAC
TCTGAGAATACTGTACGACGAGTTTACCAGGTTTATGAACTTTTGGACTG
TCAGTAACGAAGACCTAGACCTGTGTAGATACGTGGGCTGCAAACTGATA
TTTTTTAAACACCCCACGGTGGACTTTATGGTACAGATAAACACTCAGCC
TCCTTTCTTAGACACAAGCCTCACCGCGGCCAGCATACACCCGGGCATCA
TGATGCTCAGCAAGAGACGCATATTAATACCCTCTCTAAAGACCCGGCCG
AGCAGAAAACACAGGGTGGTCGTCAGGGTGGGCGCCCCAAGACTTTTTCA
GGACAAGTGGTACCCCCAGTCAGACCTATGTGACACAGTTCTGCTTTCCA
TATTTGCAACCGCCCGCGACTTGCAATATCCGTTCGGCTCACCACTAACT
GACAACCCTTGCGTCAACTTCCAGATCCTGGGGCCCCAGTACAAAAAACA
CCTTAGTATTAGCTCCACTATGGATGATACTAACAAACAGCACTATAACA
GCAACTTATTTAATAAAACTGCACTATACAACACCTTTCAAACCATAGCC
CGGCTTAAAGAGACAGGACAAACTGCAAACATTAGTCCAAGTTGGAGTGA
AGTACAAAACACAAAACTACTAGATCACACAGGTGCTAATGCAACTGCCA
GCAGAGACACTTGGTACAAGGGAAACACATACAATGACTACATACAACAG
TTAGCAGAGAAAACAAGAGAAAGGTTTAAAAAAGCAACAATGTCAGCACT
ACCAAACTACCCCACAATAATGTCCACAGACTTATACGAATACCACTCAG
GCATATACTCCAGCATATTTCTATCAGCTGGCAGGAGCTACTTTGAAACC
ACTGGGGCCTACTCTGACATTATATACAACCCTTTGACAGACAAAGGCAC
AGGCAACATAATCTGGATAGACTACCTTACAAAAGACGACACAATCTTTG
TAAAAAACAAAAGCAAATGTGAGATAATGGACATGCCCCTGTGGGCGGCC
GGCACAGGATACACAGAGTTTTGTGCAAAGTACACAGGAGACTCTGCCAT
TATTTACAATGCCAGAATACTCATAAGATGCCCATACACTGAACCCATGC
TAATAGACCACTCAGACCCAAACAAAGGCTTTGTACCGTACTCATTTAAC
TTTGGCAACGGAAAGATGCCGGGAGGCAGCTCCAACGTGCCCATAAGAAT
GAGAGCCAAGTGGTACGTAAACATATTCCACCAAAAAGAAGTATTGGAGA
GCATAGTACAGTCCGGACCGTTCGGGTACAGGGGCGACATAAAATCAGCT
GTACTGTCCATGAAATACAGATTTCACTGGAAATGGGGCGGAAACCCTAT
ATCCAAACAGGTCGTCAGGAATCCCTGCTCCAACTCCAGCACCTCCGCGG
CCCATAGAGGACCTCGCAGCGTACAAGCGGTTGACCCGAAATACAATACC
CCAGAAGTCACTTGGCACTCGTGGGACATCAGACGAGGACTCTTTGGCAA
AGCAGGTATTAAAAGAATGCAACAAGAATCAGATGCTCTTTACGTTCCTG
CAGGACCACTCAAGAGGCCTCGCAGAGACACCAACGCCCAAGACCCGGAA
AAGCAAAACGAAAGCTCACGTTTCGGAGTCCAGCAGCGACTCCCGTGGGT
CCACTCCAGCCAAGAGACGCAAAGCTCCGAAGAAGAGACGCAGGCGCAGG
GGTCGGTACAAGACCAACTACTCCTCCAGCTCCGAGAGCAGCGAGTACTC
CGACTCCAGCTCCAACAACTCGCACCCCAAGTCCTCAAAGTTCAAGCAGG
ACACAGCCTACACCCCCTATTATCCTCCCAAGCATAAACAAAGCCTATAT
GTTTGAACCCCAGGGTCCTAAACCCATACAGGGGTACAACGATTGGCTAG
AGGAGTACACTAGTTGCAAGTTCCGGGACAGACCCCCGAGAATGCTACAC
ACAGACTTACCCTTTTACCCCTGGGCACCAAAACCCCAAGACCAAGTCAG
GGTAACCTTTAAACTCAACTTTCAATAAAAATTCTAGGCCGTGGGACTTT
CACTTGTCGGTGTCTGCTTCTTAAGGTCGCCAAGCACTCCGAGCGTCAGC
GAGGAGTGCGACCCCCCCCCTCGGTAGCAACGCCTTCGGAGCCGCGCGCT
ACGCCTTCGGCTGCGCGCGGCACCTCAGACCCCCCCTCCACCCGAAACGC
TTGCGCGTTTCGGACCTTCGGCGTCGGGGGGGTCGGGAGCTTTATTAAAC
AGACTCCGAGTTGCCATTGGACACTGGAGCTGTGAATCAGTAACGAAAGT
GAGTGGGGCCAGACTTCGCCATAGGGCCTTTATCTTCTCGCCATTGGATA
GTGTCCGGGGTTGCCGTAGGCTTCGGCCTCGTTTTTAGGCCTTCCGGACT
ACAAAAATGGCGGATTTTGTGACGTCACGGCCGCCATTTTAAGTAAGGCG
GAAGCAGCTCCACCCTCTCACATAATGGCGGCGGAGCACTCCCGGCTTGC
CCAAAATGGCGGGCAAGCTCTTCCGGGTCAAAGGTTGGCAGCTACGTCAC
AAGTCACCTGACTGGGGAGGAGTTACATCCCGGAAGTTCTCCTCGGTCAC
GTGACTGTACACGTGACTGCTACGTCATTGACGCCATCTTGTGTCACAAA
ATGGCGGTGCACTTCCGCTTTTTTGAAAAAAGGCGCGAAAAAACGGCGGC
GGCGGCGCGCGCGCTGCGCGCGCGCGCCGGGGGGGCGCCAGCGCCCCCCC
CCCCGCGCATGCACGGGTCCCCCCCCCCACGGGGGGCTCCGCCCCCCGGC
CCCCCCCC
Annotations:
Putative Domain Base Range
TATA Box 83-87
Cap Site 104-111
Transcriptional Start Site 111
5' UTR Conserved Domain 171-241
ORF2 341-703
ORF2/2 341-699; 2311-2806
ORF2/3 341-699; 2504-2978
ORF2t/3 341-387; 2504-2978
ORF1 577-2787
ORF1/1 577-699; 2311-2787
ORF1/2 577-699; 2504-2806
Three open-reading frame region 2463-2784
Poly(A) Signal 2974-2979
GC-rich region 3644-3758

TABLE 10
Exemplary Anellovirus amino acid sequences (Alphatorquevirus,
Clade 5) TTV-HD23a (Alphatorquevirus Clade 5)

| | |
|---|---|
| | (SEQ ID NO: 34) |
| ORF2 | MWQPPAHNVPGIERNWYESCFRSHAAVCGCGDFVGHINHLATTLGRPPRPGPPGGP |
| | RTPQIRNLPALPAPQGEPGDRAPWRGVSGADAAGGDGGERGADGGDPGDVGDDA |
| | LLAAFELVEE |
| | (SEQ ID NO: 35) |
| ORF2/2 | MWQPPAHNVPGIERNWYESCFRSHAAVCGCGDFVGHINHLATTLGRPPRPGPPGGP |
| | RTPQIRNLPALPAPQGEPGDRAPWRGVSGADAAGGDGGERGADGGDPGDVGDDA |
| | LLAAFELVEESSGIPAPTPAPPRPIEDLAAYKRLTRNTIPQKSLGTRGTSDEDSLAKQ |
| | VLKECNKNQMLFTFLQDHSRGLAETPTPKTRKSKTKAHVSESSSDSRGSTPAKRRK |
| | APKKRRRRRGRYKTNYSSSSESSEYSDSSSNNSHPKSSKFKQDTAYTPYYPPKHKQS |
| | LYV |
| | (SEQ ID NO: 36) |
| ORF2/3 | MWQPPAHNVPGIERNWYESCFRSHAAVCGCGDFVGHINHLATTLGRPPRPGPPGGP |
| | RTPQIRNLPALPAPQGEPGDRAPWRGVSGADAAGGDGGERGADGGDPGDVGDDA |
| | LLAAFELVEETTQEASQRHQRPRPGKAKRKLTFRSPAATPVGPLQPRDAKLRRRDA |
| | GAGVGTRPTTPPAPRAASTPTPAPTTRTPSPQSSSRTQPTPPIILPSINKAYMFEPQGPK |
| | PIQGYNDWLEEYTSCKFRDRPPRMLHTDLPFYPWAPKPQDQVRVTFKLNFQ |
| | (SEQ ID NO: 37) |
| ORF2t/3 | MWQPPAHNVPGIERNWTTQEASQRHQRPRPGKAKRKLTFRSPAATPVGPLQPRDA |
| | KLRRRDAGAGVGTRPTTPPAPRAASTPTPAPTTRTPSPQSSSRTQPTPPIILPSINKAY |
| | MFEPQGPKPIQGYNDWLEEYTSCKFRDRPPRMLHTDLPFYPWAPKPQDQVRVTFKL |
| | NFQ |
| | (SEQ ID NO: 38) |
| ORF1 | MAWGFWGRRRRWRRWRARRRRWRPRRRRRRRPARRFRARRRVRRRGGRWRRR |
| | YRKWRRGRRRRTHRKKIIIKQWQPNFIRRCYIIGCLPLVFCGENTTAQNYATHSDDM |
| | ISKGPYGGGMTTTKFTLRILYDEFTRFMNFWTVSNEDLDLCRYVGCKLIFFKHPTVD |
| | FMVQINTQPPFLDTSLTAASIHPGIMMLSKRRILIPSLKTRPSRKHRVVVRVGAPRLF |
| | QDKWYPQSDLCDTVLLSIFATARDLQYPFGSPLTDNPCVNFQILGPQYKKHLSISST |
| | MDDTNKQHYNSNLFNKTALYNTFQTIARLKETGQTANISPSWSEVQNTKLLDHTG |
| | ANATASRDTWYKGNTYNDYIQQLAEKTRERFKKATMSALPNYPTIMSTDLYEYHS |
| | GIYSSIFLSAGRSYFETTGAYSDIIYNPLTDKGTGNIIWIDYLTKDDTIFVKNKSKCEI |
| | MDMPLWAAGTGYTEFCAKYTGDSAIIYNARILIRCPYTEPMLIDHSDPNKGFVPYSF |
| | NFGNGKMPGGSSNVPIRMRAKWYVNIFHQKEVLESIVQSGPFGYRGDIKSAVLSMK |
| | YRFHWKWGGNPISKQVVRNPCSNSSTSAAHRGPRSVQAVDPKYNTPEVTWHSWDI |
| | RRGLFGKAGIKRMQQESDALYVPAGPLKRPRRDTNAQDPEKQNESSRFGVQQRLP |
| | WVHSSQETQSSEEETQAQGSVQDQLLLQLREQRVLRLQLQQLAPQVLKVQAGHSL |
| | HPLLSSQA |
| | (SEQ ID NO: 39) |
| ORF1/1 | MAWGFWGRRRRWRRWRARRRRWRPRRRRRRRPARRFRARRRVVRNPCSNSSTS |
| | AAHRGPRSVQAVDPKYNTPEVTWHSWDIRRGLFGKAGIKRMQQESDALYVPAGPL |
| | KRPRRDTNAQDPEKQNESSRFGVQQRLPWVHSSQETQSSEEETQAQGSVQDQLLLQ |
| | LREQRVLRLQLQQLAPQVLKVQAGHSLHPLLSSQA |
| | (SEQ ID NO: 40) |
| ORF1/2 | MAWGFWGRRRRWRRWRARRRRWRPRRRRRRRPARRFRARRRDHSRGLAETPTP |
| | KTRKSKTKAHVSESSSDSRGSTPAKRRKAPKKRRRRRGRYKTNYSSSSESSEYSDSS SNNSHPKSSKFKQDTAYTPYYPPKHKQSLYV |

TABLE 11
Exemplary Anellovirus nucleic acid
sequence (Betatorquevirus)

Name TTMV-LY2
Genus/Clade Betatorquevirus
Accession Number JX134045.1
Full Sequence: 2797 bp
(SEQ ID NO: 41)
1 10 20 30 40 50
| | | | | |
TAATAAATATTCAACAGGAAAACCACCTAATTTAAATTGCCGACCACAAA
CCGTCACTTAGTTCCCCTTTTTGCAACAACTTCTGCTTTTTTCCAACTGC
CGGAAAACCACATAATTTGCATGGCTAACCACAAACTGATATGCTAATTA
ACTTCCACAAAACAACTTCCCCTTTTAAAACCACACCTACAAATTAATTA
TTAAACACAGTCACATCCTGGGAGGTACTACCACACTATAATACCAAGTG
CACTTCCGAATGGCTGAGTTTATGCCGCTAGACGGAGAACGCATCAGTTA
CTGACTGCGGACTGAACTTGGGCGGGTGCCGAAGGTGAGTGAAACCACCG
AAGTCAAGGGGCAATTCGGGCTAGTTCAGTCTAGCGGAACGGGCAAGAAA
CTTAAAATTATTTTATTTTTCAGATGAGCGACTGCTTTAAACCAACATGC
TACAACAACAAAACAAAGCAAACTCACTGGATTAATAACCTGCATTTAAC
CCACGACCTGATCTGCTTCTGCCCAACACCAACTAGACACTTATTACTAG
CTTTAGCAGAACAACAAGAAACAATTGAAGTGTCTAAACAAGAAAAAGAA
AAAATAACAAGATGCCTTATTACTACAGAAGAAGACGGTACAACTACAGA
CGTCCTAGATGGTATGGACGAGGTTGGATTAGACGCCCTTTTCGCAGAAG
ATTTCGAAGAAAAAGAAGGGTAAGACCTACTTATACTACTATTCCTCTAA
AGCAATGGCAACCGCCATATAAAAGAACATGCTATATAAAAGGACAAGAC
TGTTTAATATACTATAGCAACTTAAGACTGGGAATGAATAGTACAATGTA
TGAAAAAAGTATTGTACCTGTACATTGGCCGGGAGGGGGTTCTTTTTCTG
TAAGCATGTTAACTTTAGATGCCTTGTATGATATACATAAACTTTGTAGA
AACTGGTGGACATCCACAAACCAAGACTTACCACTAGTAAGATATAAAGG
ATGCAAAATAACATTTTATCAAAGCACATTTACAGACTACATAGTAAGAA
TACATACAGAACTACCAGCTAACAGTAACAAACTAACATACCCAAACACA
CATCCACTAATGATGATGATGTCTAAGTACAAACACATTATACCTAGTAG
ACAAACAAGAAGAAAAAAGAAACCATACACAAAAATATTTGTAAAACCAC
CTCCGCAATTTGAAAACAAATGGTACTTTGCTACAGACCTCTACAAAATT
CCATTACTACAAATACACTGCACAGCATGCAACTTACAAAACCCATTTGT
AAAACCAGACAAATTATCAAACAATGTTACATTATGGTCACTAAACACCA
TAAGCATACAAAATAGAAACATGTCAGTGGATCAAGGACAATCATGGCCA
TTTAAAATACTAGGAACACAAAGCTTTTATTTTTACTTTTACACCGGAGC
AAACCTACCAGGTGACACAACACAAATACCAGTAGCAGACCTATTACCAC
TAACAAACCCAAGAATAAACAGACCAGGACAATCACTAAATGAGGCAAAA
ATTACAGACCATATTACTTTCACAGAATACAAAAACAAATTTACAAATTA
TTGGGGTAACCCATTTAATAAACACATTCAAGAACACCTAGATATGATAC
TATACTCACTAAAAAGTCCAGAAGCAATAAAAAACGAATGGACAACAGAA
AACATGAAATGGAACCAATTAAACAATGCAGGAACAATGGCATTAACACC
ATTTAACGAGCCAATATTCACACAAATACAATATAACCCAGATAGAGACA
CAGGAGAAGACACTCAATTATACCTACTCTCTAACGCTACAGGAACAGGA
TGGGACCCACCAGGAATTCCAGAATTAATACTAGAAGGATTTCCACTATG
GTTAATATATTGGGGATTTGCAGACTTTCAAAAAAACCTAAAAAAAGTAA
CAAACATAGACACAAATTACATGTTAGTAGCAAAAACAAAATTTACACAA
AAACCTGGCACATTCTACTTAGTAATACTAAATGACACCTTTGTAGAAGG
CAATAGCCCATATGAAAAACAACCTTTACCTGAAGACAACATTAAATGGT
ACCCACAAGTACAATACCAATTAGAAGCACAAAACAAACTACTACAAACT
GGGCCATTTACACCAAACATACAAGGACAACTATCAGACAATATATCAAT
GTTTTATAAATTTTACTTTAAATGGGGAGGAAGCCCACCAAAAGCAATTA
ATGTTGAAAATCCTGCCCACCAGATTCAATATCCCATACCCCGTAACGAG
CATGAAACAACTTCGTTACAGAGTCCAGGGGAAGCCCCAGAATCCATCTT
ATACTCCTTCGACTATAGACACGGGAACTACACAACAACAGCTTTGTCAC
GAATTAGCCAAGACTGGGCACTTAAAGACACTGTTTCTAAAATTACAGAG
CCAGATCGACAGCAACTGCTCAAACAAGCCCTCGAATGCCTGCAAATCTC
GGAAGAAACGCAGGAGAAAAAAGAAAAAGAAGTACAGCAGCTCATCAGCA
ACCTCAGACAGCAGCAGCAGCTGTACAGAGAGCGAATAATATCATTATTA
AAGGACCAATAACTTTTAACTGTGTAAAAAAGGTGAAATTGTTTGATGAT
AAACCAAAAAACCGTAGATTTACACCTGAGGAATTTGAAACTGAGTTACA
AATAGCAAAATGGTTAAAGAGACCCCCAAGATCCTTTGTAAATGATCCTC
CCTTTTACCCATGGTTACCACCTGAACCTGTTGTAAACTTTAAGCTTAAT
TTTACTGAATAAAGGCCAGCATTAATTCACTTAAGGAGTCTGTTTATTTA
AGTTAAACCTTAATAAACGGTCACCGCCTCCCTAATACGCAGGCGCAGAA
AGGGGGCTCCGCCCCCTTTAACCCCCAGGGGGCTCCGCCCCCTGAAACCC
CCAAGGGGGCTACGCCCCCTTACACCCCC
Annotations:
Putative Domain Base range
TATA Box 237-243
Cap Site 260-267
Transcriptional Start Site 267
5' UTR Conserved Domain 323-393
ORF2 424-723
ORF2/2 424-719; 2274-2589
ORF2/3 424-719; 2449-2812
ORF1 612-2612
ORF1/1 612-719; 2274-2612
ORF1/2 612-719 2449-2589
Three open-reading frame region 2441-2586
Poly(A) Signal 2808-2813
GC-rich region 2868-2929

TABLE 12
Exemplary Anellovirus amino acid sequences (Betatorquevirus)
TTMV-LY2 (Betatorquevirus)

| | |
|---|---|
| | (SEQ ID NO: 42) |
| ORF2 | MSDCFKPTCYNNKTKQTHWINNLHLTHDLICFCPTPTRHLLLALAEQQETIEVSKQEKQE |
| | KEKITRCLITTEEDGTTTDVLDGMDEVGLDALFAEDFEEKEG |
| | (SEQ ID NO: 43) |
| ORF2/2 | MSDCFKPTCYNNKTKQTHWINNLHLTHDLICFCPTPTRHLLLALAEQQETIEVSKQEKQE |
| | KEKITRCLITTEEDGTTTDVLDGMDEVGLDALFAEDFEEKEGFNIPYPVTSMKQLRY |
| | RVQGKPQNPSYTPSTIDTGTTQQQLCHELAKTGHLKTLFLKLQSQIDSNCSNKPSNA |
| | CKSRKKRRRKKKKKYSSSSATSDSSSSCTESE |
| | (SEQ ID NO: 44) |
| ORF2/3 | MSDCFKPTCYNNKTKQTHWINNLHLTHDLICFCPTPTRHLLLALAEQQETIEVSKQEKQE |
| | KEKITRCLITTEEDGTTTDVLDGMDEVGLDALFAEDFEEKEGARSTATAQTSPRMP |
| | ANLGRNAGEKRKRSTAAHQQPQTAAAAVQRANNIIIKGPITFNCVKKVKLFDDKPK |
| | NRRFTPEEFETELQIAKWLKRPPRSFVNDPPFYPWLPPEPVVNFKLNFTE |
| | (SEQ ID NO: 45) |
| ORF1 | MPYYYRRRRYNYRRPRWYGRGWIRRPFRRRFRRKRRVRPTYTTIPLKQWQPPYKR |
| | TCYIKGQDCLIYYSNLRLGMNSTMYEKSIVPVHWPGGGSFSVSMLTLDALYDIHKL |
| | CRNWWTSTNQDLPLVRYKGCKITFYQSTFTDYIVRIHTELPANSNKLTYPNTHPLM |
| | MMMSKYKHIIPSRQTRRKKKPYTKIFVKPPPQFENKWYFATDLYKIPLLQIHCTACN |
| | LQNPFVKPDKLSNNVTLWSLNTISIQNRNMSVDQGQSWPFKILGTQSFYFYFYTGA |
| | NLPGDTTQIPVADLLPLTNPRINRPGQSLNEAKITDHITFTEYKNKFTNYWGNPFNK |
| | HIQEHLDMILYSLKSPEAIKNEWTTENMKWNQLNNAGTMALTPFNEPIFTQIQYNP |
| | DRDTGEDTQLYLLSNATGTGWDPPGIPELILEGFPLWLIYWGFADFQKNLKKVTNID |
| | TNYMLVAKTKFTQKPGTFYLVILNDTFVEGNSPYEKQPLPEDNIKWYPQVQYQLEA |
| | QNKLLQTGPFTPNIQGQLSDNISMFYKFYFKWGGSPPKAINVENPAHQIQYPIPRNE |
| | HETTSLQSPGEAPESILYSFDYRHGNYTTTALSRISQDWALKDTVSKITEPDRQQLLK |
| | QALECLQISEETQEKKEKEVQQLISNLRQQQQLYRERIISLLKDQ |
| | (SEQ ID NO: 46) |
| ORF1/1 | MPYYYRRRRYNYRRPRWYGRGWIRRPFRRRFRRKRRIQYPIPRNEHETTSLQSPGE |
| | APESILYSFDYRHGNYTTTALSRISQDWALKDTVSKITEPDRQQLLKQALECLQISEE |
| | TQEKKEKEVQQLISNLRQQQQLYRERIISLLKDQ |
| | (SEQ ID NO: 47) |
| ORF1/2 | MPYYYRRRRYNYRRPRWYGRGWIRRPFRRRFRRKRRSQIDSNCSNKPSNACKSRK |
| | KRRRKKKKKYSSSSATSDSSSSCTESE |

TABLE 13
Exemplary Anellovirus nucleic acid
sequence (Gammatorquevirus)

Name TTMDV-MD1-073
Genus/Clade Gammatorquevirus
Accession Number AB290918.1
Full Sequence: 3242 bp
(SEQ ID NO: 48)
1 10 20 30 40 50
| | | | | |
AGGTGGAGACTCTTAAGCTATATAACCAAGTGGGGTGGCGAATGGCTGAG
TTTACCCCGCTAGACGGTGCAGGGACCGGATCGAGCGCAGCGAGGAGGTC
CCCGGCTGCCCGTGGGCGGGAGCCCGAGGTGAGTGAAACCACCGAGGTCT
AGGGGCAATTCGGGCTAGGGCAGTCTAGCGGAACGGGCAAGAAACTTAAA
AATATTTCTTTTACAGATGCAAAACCTATCAGCCAAAGACTTCTACAAAC
CATGCAGATACAACTGTGAAACTAAAAACCAAATGTGGATGTCTGGCATT
GCTGACTCCCATGACAGTTGGTGTGACTGTGATACTCCTTTTGCTCACCT
CCTGGCTAGTATTTTTCCTCCTGGTCACACAGATCGCACACGAACCATCC
AAGAAATACTTACCAGAGATTTTAGGAAAACATGCCTTTCTGGTGGGGCC
GACGCAACAAATTCTGGTATGGCCGAAACTATAGAAGAAAAAAGAGAAGA
TTTCCAAAAAGAAGAAAAAGAAGATTTTACAGAAGAACAAAATATAGAAG
ACCTGCTCGCCGCCGTCGCAGACGCAGAAGGAAGGTAAGAAGAAAAAAAA
AAACTCTTATAGTAAGACAATGGCAGCCAGACTCTATTGTACTCTGTAAA
ATTAAAGGGTATGACTCTATAATATGGGGAGCTGAAGGCACACAGTTTCA
ATGTTCTACACATGAAATGTATGAATATACAAGACAAAAGTACCCTGGGG
GAGGAGGATTTGGTGTACAACTTTACAGCTTAGAGTATTTGTATGACCAA
TGGAAACTTAGAAATAATATATGGACTAAAACAAATCAACTCAAAGATTT
GTGTAGATACTTAAAATGTGTTATGACCTTTTACAGACACCAACACATAG
ATTTTGTAATTGTATATGAAAGACAACCCCCATTTGAAATAGATAAACTA
ACATACATGAAATATCATCCATATATGTTATTACAAAGAAAGCATAAAAT
AATTTTACCTAGTCAAACAACTAATCCTAGAGGTAAATTAAAAAAAAAGA
AAACTATTAAACCTCCCAAACAAATGCTCAGCAAATGGTTTTTTCAACAA
CAATTTGCTAAATATGATCTACTACTTATTGCTGCAGCAGCATGTAGTTT
AAGATACCCTAGAATAGGCTGCTGCAATGAAAATAGAATGATAACCTTAT
ACTGTTTAAATACTAAATTTTATCAAGATACAGAATGGGGAACTACAAAA
CAGGCCCCCCACTACTTTAAACCATATGCAACAATTAATAAATCCATGAT
ATTTGTCTCTAACTATGGAGGTAAAAAAACAGAATATAACATAGGCCAAT
GGATAGAAACAGATATACCTGGAGAAGGTAATCTAGCAAGATACTACAGA
TCAATAAGTAAAGAAGGAGGTTACTTTTCACCTAAAATACTGCAAGCATA
TCAAACAAAAGTAAAGTCTGTAGACTACAAACCTTTACCAATTGTTTTAG
GTAGATATAACCCAGCAATAGATGATGGAAAAGGCAACAAAATTTACTTA
CAAACTATAATGAATGGCCATTGGGGCCTACCTCAAAAAACACCAGATTA
TATAATAGAAGAGGTCCCTCTTTGGCTAGGCTTCTGGGGATACTATAACT
ACTTAAAACAAACAAGAACTGAAGCTATATTTCCACTACACATGTTTGTA
GTGCAAAGCAAATACATTCAAACACAACAAACAGAAACACCTAACAATTT
TTGGGCATTTATAGACAACAGCTTTATACAGGGCAAAAACCCATGGGACT
CAGTTATTACTTACTCAGAACAAAAGCTATGGTTTCCTACAGTTGCATGG
CAACTAAAAACCATAAATGCTATTTGTGAAAGTGGACCATATGTACCTAA
ACTAGACAATCAAACATATAGTACCTGGGAACTAGCAACTCATTACTCAT
TTCACTTTAAATGGGGTGGTCCACAGATATCAGACCAACCAGTTGAAGAC
CCAGGAAACAAAAACAAATATGATGTGCCCGATACAATCAAAGAAGCATT
ACAAATTGTTAACCCAGCAAAAAACATTGCTGCCACGATGTTCCATGACT
GGGACTACAGACGGGGTTGCATTACATCAACAGCTATTAAAAGAATGCAA
CAAAACCTCCCAACTGATTCATCTCTCGAATCTGATTCAGACTCAGAACC
AGCACCCAAGAAAAAAAGACTACTACCAGTCCTCCACGACCCACAAAAGA
AAACGGAAAAGATCAACCAATGTCTCCTCTCTCTCTGCGAAGAAAGTACA
TGCCAGGAGCAGGAAACGGAGGAAAACATCCTCAAGCTCATCCAGCAGCA
GCAGCAGCAGCAGCAGAAACTCAAGCACAACCTCTTAGTACTAATCAAGG
ACTTAAAAGTGAAACAAAGATTATTACAACTACAAACGGGGGTACTAGAA
TAACCCTTACCAGATTTAAACCAGGATTTGAGCAAGAAACTGAAAAAGAG
TTAGCACAAGCATTTAACAGACCCCCTAGACTGTTCAAAGAAGATAAACC
CTTTTACCCCTGGCTACCCAGATTTACACCCCTTGTAAACTTTCACCTTA
ATTTTAAAGGCTAGGCCTACACTGCTCACTTAGTGGTGTATGTTTATTAA
AGTTTGCACCCCAGAAAAATTGTAAAATAAAAAAAAAAAAAAAAAATAAA
AAATTGCAAAAATTCGGCGCTCGCGCGCGCTGCGCGCGCGAGCGCCGTCA
CGCGCCGGCGCTCGCGCGCCGCGCGTATGTGCTAACACACCACGCACCTA
GATTGGGGTGCGCGCGTAGCGCGCGCACCCCAATGCGCCCCGCCCTCGTT
CCGACCCGCTTGCGCGGGTCGGACCACTTCGGGCTCGGGGGGGCGCGCCT
GCGGCGCTTATTTACTAAACAGACTCCGAGTCGCCATTGGGCCCCCCCTA
AGCTCCGCCCCCCTCATGAATATTCATAAAGGAAACCACAAAATTAGAAT
TGCCGACCACAAACTGCCATATGCTAATTAGTTCCCCTTTTACACAGTAA
AAAGGGGAAGTGGGGGGGCAGAGCCCCCCCACACCCCCCGCGGGGGGGGC
AGAGCCCCCCCCGCACCCCCCCTACGTCACAGGCCACGCCCCCGCCGCCA
TCTTGGGTGCGGCAGGGCGGGGACTAAAATGGCGGGACCCAATCATTTTA
TACTTTCACTTTCCAATTAAAACCCGCCACGTCACACAAAAG
Annotations:
Putative Domain Base range
TATA Box 21-25
Cap Site 42-49
Transcriptional Start Site 49
5' UTR Conserved Domain 117-187
ORF2 283-588
0RF2/2 283-584; 1977-2388
0RF2/3 283-584; 2197-2614
ORF1 432-2453
ORF1/1 432-584; 1977-2453
ORF1/2 432-584; 2197-2388
Three open-reading frame region 2186-2385
Poly(A) Signal 2676-2681
GC-rich region 3054-3172

TABLE 14
Exemplary Anellovirus amino acid sequences (Gammatorquevirus)
TTMDV-MD1-073 (Gammatorquevirus)

| | |
|---|---|
| | (SEQ ID NO: 49) |
| ORF2 | MWMSGIADSHDSWCDCDTPFAHLLASIFPPGHTDRTRTIQEILTRDFRKTCLSGGAD |
| | ATNSGMAETIEEKREDFQKEEKEDFTEEQNIEDLLAAVADAEGR |
| | (SEQ ID NO: 50) |
| ORF2/2 | MWMSGIADSHDSWCDCDTPFAHLLASIFPPGHTDRTRTIQEILTRDFRKTCLSGGAD |
| | ATNSGMAETIEEKREDFQKEEKEDFTEEQNIEDLLAAVADAEGRYQTNQLKTQETK |
| | TNMMCPIQSKKHYKLLTQQKTLLPRCSMTGTTDGVALHQQLLKECNKTSQLIHLSN |
| | LIQTQNQHPRKKDYYQSSTTHKRKRKRSTNVSSLSAKKVHARSRKRRKTSSSSSSSS |
| | SSSSRNSSTTS |
| | (SEQ ID NO: 51) |
| ORF2/3 | MWMSGIADSHDSWCDCDTPFAHLLASIFPPGHTDRTRTIQEILTRDFRKTCLSGGAD |
| | ATNSGMAETIEEKREDFQKEEKEDFTEEQNIEDLLAAVADAEGRTSTQEKKTTTSPP |
| | RPTKENGKDQPMSPLSLRRKYMPGAGNGGKHPQAHPAAAAAAAETQAQPLSTNQ |
| | GLKSETKIITTTNGGTRITLTRFKPGFEQETEKELAQAFNRPPRLFKEDKPFYPWLPRF |
| | TPLVNFHLNFKG |
| | (SEQ ID NO: 52) |
| ORF1 | MPFWWGRRNKFWYGRNYRRKKRRFPKRRKRRFYRRTKYRRPARRRRRRRRKVR |
| | RKKKTLIVRQWQPDSIVLCKIKGYDSIIWGAEGTQFQCSTHEMYEYTRQKYPGGGG |
| | FGVQLYSLEYLYDQWKLRNNIWTKTNQLKDLCRYLKCVMTFYRHQHIDFVIVYER |
| | QPPFEIDKLTYMKYHPYMLLQRKHKIILPSQTTNPRGKLKKKKTIKPPKQMLSKWFF |
| | QQQFAKYDLLLIAAAACSLRYPRIGCCNENRMITLYCLNTKFYQDTEWGTTKQAPH |
| | YFKPYATINKSMIFVSNYGGKKTEYNIGQWIETDIPGEGNLARYYRSISKEGGYFSPK |
| | ILQAYQTKVKSVDYKPLPIVLGRYNPAIDDGKGNKIYLQTIMNGHWGLPQKTPDYII |
| | EEVPLWLGFWGYYNYLKQTRTEAIFPLHMFVVQSKYIQTQQTETPNNFWAFIDNSFI |
| | QGKNPWDSVITYSEQKLWFPTVAWQLKTINAICESGPYVPKLDNQTYSTWELATH |
| | YSFHFKWGGPQISDQPVEDPGNKNKYDVPDTIKEALQIVNPAKNIAATMFHDWDY |
| | RRGCITSTAIKRMQQNLPTDSSLESDSDEPAPKKKRLLPVLHDPQKKTEKINQCLLS |
| | LCEESTCQEQETEENILKLIQQQQQQQQKLKHNLLVLIKDLKVKQRLLQLQTGVLE |
| | (SEQ ID NO: 53) |
| ORF1/1 | MPFWWGRRNKFWYGRNYRRKKRRFPKRRKRRFYRRTKYRRPARRRRRRRRKISD |
| | QPVEDPGNKNKYDVPDTIKEALQIVNPAKNIAATMFHDWDYRRGCITSTAIKRMQQ |
| | NLPTDSSLESDSDSEPAPKKKRLLPVLHDPQKKTEKINQCLLSLCEESTCQEQETEEN |
| | ILKLIQQQQQQQQKLKHNLLVLIKDLKVKQRLLQLQTGVLE |
| | (SEQ ID NO: 54) |
| ORF1/2 | MPFWWGRRNKFWYGRNYRRKKRRFPKRRKRRFYRRTKYRRPARRRRRRRRKISD |
| | QPVEDPGNKNKYDVPDTIKEALQIVNPAKNIAATMFHDWDYRRGCITSTAIKRMQQ |
| | NLPTDSSLESDSDSEPAPKKKRLLPVLHDPQKKTEKINQCLLSLCEESTCQEQETEEN |
| | ILKLIQQQQQQQQKLKHNLLVLIKDLKVKQRLLQLQTGVLE |

[0397] In some embodiments, a synthetic curon comprises a minimal Anellovirus genome, e.g., as identified according to the method described in Example 9. In some embodiments, a synthetic curon comprises an Anellovirus sequence, or a portion thereof, as described in Example 13.

[0398] In some embodiments, a synthetic curon comprises a genetic element comprising a consensus Anellovirus motif, e.g., as shown in Table 14-1. In some embodiments, a synthetic curon comprises a genetic element comprising a consensus Anellovirus ORF1 motif, e.g., as shown in Table 14-1. In some embodiments, a synthetic curon comprises a genetic element comprising a consensus Anellovirus ORF1/1 motif, e.g., as shown in Table 14-1. In some embodiments, a synthetic curon comprises a genetic element comprising a consensus Anellovirus ORF1/2 motif, e.g., as shown in Table 14-1. In some embodiments, a synthetic curon comprises a genetic element comprising a consensus Anellovirus ORF2/2 motif, e.g., as shown in Table 14-1. In some embodiments, a synthetic curon comprises a genetic element comprising a consensus Anellovirus ORF2/3 motif, e.g., as shown in Table 14-1. In some embodiments, a synthetic curon comprises a genetic element comprising a consensus Anellovirus ORF2t/3 motif, e.g., as shown in Table 14-1. In some embodiments, X, as shown in Table 14-1, indicates any amino acid. In some embodiments, Z, as shown in Table 14-1, indicates glutamic acid or glutamine. In some embodiments, B, as shown in Table 14-1, indicates aspartic acid or asparagine. In some embodiments, J, as shown in Table 14-1, indicates leucine or isoleucine.

TABLE 14-1
Consensus motifs in open reading frames (ORFs) of Anelloviruses

| | Open | | | |
|---|---|---|---|---|
| Consensus | Reading | | | SEQ ID |
| Threshold | Frame | Position | Motif | NO: |
| 50 | ORF1 | 79 | LIJRQWQPXXIRRCXIXGYXPLIXC | 55 |
| 50 | ORF1 | 111 | NYXXHXD | 56 |
| 50 | ORF1 | 135 | FSLXXLYDZ | 57 |
| 50 | ORF1 | 149 | NXWTXSNXDLDLCRYXGC | 58 |
| 50 | ORF1 | 194 | TXPSXHPGXMXLXKHK | 59 |
| 50 | ORF1 | 212 | IPSLXTRPXG | 60 |
| 50 | ORF1 | 228 | RIXPPXLFXDKWYFQXDL | 61 |
| 50 | ORF1 | 250 | LLXIXATA | 62 |
| 50 | ORF1 | 260 | LXXPFXSPXTD | 63 |
| 50 | ORF1 | 448 | YNPXXDKGXGNXIW | 64 |
| 50 | ORF1 | 519 | CPYTZPXL | 65 |
| 50 | ORF1 | 542 | XFGXGXMP | 66 |
| 50 | ORF1 | 569 | HQXEVXEX | 67 |
| 50 | ORF1 | 600 | KYXFXFXWGGNP | 68 |
| 50 | ORF1 | 653 | HSWDXRRG | 69 |
| 50 | ORF1 | 666 | AIKRXQQ | 70 |
| 50 | ORF1 | 750 | XQZQXXLR | 71 |
| 50 | ORF1/1 | 73 | PRXJQXXDP | 72 |
| 50 | ORF1/1 | 91 | HSWDXRRG | 73 |
| 50 | ORF1/1 | 105 | AIKRXQQ | 74 |
| 50 | ORF1/1 | 187 | QZQXXLR | 75 |
| 50 | ORF1/2 | 97 | KXKRRRR | 76 |
| 50 | ORF2/2 | 158 | PIXSLXXYKXXTR | 77 |
| 50 | ORF2/2 | 189 | LAXQLLKECXKN | 78 |
| 50 | ORF2/3 | 39 | HLNXLA | 79 |
| 50 | ORF2/3 | 272 | DRPPR | 80 |
| 50 | ORF2/3 | 281 | DXPFYPWXP | 81 |
| 50 | ORF2/3 | 300 | VXFKLXF | 82 |
| 50 | ORF2t/3 | 4 | WXPPVHBVXGIERXW | 83 |
| 50 | ORF2t/3 | 37 | AKRKLX | 84 |
| 50 | ORF2t/3 | 140 | PSSXDWXXEY | 85 |
| 50 | ORF2t/3 | 156 | DRPPR | 86 |
| 50 | ORF2t/3 | 167 | PFYPW | 87 |
| 50 | ORF2t/3 | 183 | NVXFKLXF | 88 |
| 50 | ORF1 | 84 | JXXXXWQPXXXXXCXIXGXXXJWQP | 89 |
| 50 | ORF1 | 149 | NXWXXXNXXXXLXRY | 90 |
| 50 | ORF1 | 448 | YNPXXDXG | 91 |

### Genetic Element

[0399] In some embodiments, the curon comprises a genetic element. In some embodiments, the genetic element has one or more of the following characteristics: is substantially non-integrating with a host cell's genome, an episomal nucleic acid, a single stranded DNA, is circular, is about 1 to 10 kb, exists within the nucleus of the cell, can be bound by endogenous proteins, and produces a microRNA that targets host genes. In one embodiment, the genetic element is a substantially non-integrating DNA. In some embodiments, the genetic element has at least about 70%, 75%, 80%, 8%, 90%, 95%, 96%, 97%, 98%, 99%, or 100% sequence identity to an Anellovirus sequence, e.g., as described herein (e.g., as described in any of Tables 1-14), or a fragment thereof. In embodiments, the genetic element comprises a sequence encoding an exogenous effector (e.g., a payload), e.g., a polypeptide effector (e.g., a protein) or nucleic acid effector (e.g., a non-coding RNA, e.g., a miRNA, siRNA, mRNA, lncRNA, RNA, DNA, an antisense RNA, gRNA).

[0400] In some embodiments, the genetic element has a length less than 20 kb (e.g., less than about 19 kb, 18 kb, 17 kb, 16 kb, 15 kb, 14 kb, 13 kb, 12 kb, 11 kb, 10 kb, 9 kb, 8 kb, 7 kb, 6 kb, 5 kb, 4 kb, 3 kb, 2 kb, 1 kb, or less). In some embodiments, the genetic element has, independently or in addition to, a length greater than 1000b (e.g., at least about 1.1 kb, 1.2 kb, 1.3 kb, 1.4 kb, 1.5 kb, 1.6 kb, 1.7 kb, 1.8 kb, 1.9 kb, 2 kb, 2.1 kb, 2.2 kb, 2.3 kb, 2.4 kb, 2.5 kb, 2.6 kb, 2.7 kb, 2.8 kb, 2.9 kb, 3 kb, 3.1 kb, 3.2 kb, 3.3 kb, 3.4 kb, 3.5 kb, 3.6 kb, 3.7 kb, 3.8 kb, 3.9 kb, 4 kb, 4.1 kb, 4.2 kb, 4.3 kb, 4.4 kb, 4.5 kb, 4.6 kb, 4.7 kb, 4.8 kb, 4.9 kb, 5 kb, or greater). In some embodiments, the genetic element has a length of about 2.5-4.6, 2.8-4.0, 3.0-3.8, or 3.2-3.7 kb.

[0401] In some embodiments, the genetic element comprises one or more of the features described herein, e.g., a sequence encoding a substantially non-pathogenic protein, a protein binding sequence, one or more sequences encoding a regulatory nucleic acid, one or more regulatory sequences, one or more sequences encoding a replication protein, and other sequences.

[0402] In one embodiment, the invention includes a genetic element comprising a nucleic acid sequence (e.g., a DNA sequence) encoding (i) a substantially non-pathogenic exterior protein, (ii) an exterior protein binding sequence that binds the genetic element to the substantially non-pathogenic exterior protein, and (iii) a regulatory nucleic acid. In such an embodiment, the genetic element may comprise one or more sequences with at least about 60%, 70% 80%, 85%, 90% 95%, 96%, 97%, 98% and 99% nucleotide sequence identity to any one of the nucleotide sequences to a native viral sequence.

[0403] Proteins, e.g., Substantially Non-Pathogenic Protein

[0404] In some embodiments, the genetic element comprises a sequence that encodes a protein, e.g., a substantially non-pathogenic protein. In embodiments, the substantially non-pathogenic protein is a major component of the proteinaceous exterior of the curon. Multiple substantially non-pathogenic protein molecules may self-assemble into an icosahedral formation that makes up the proteinaceous exterior. In embodiments, the protein is present in the proteinaceous exterior.

[0405] In some embodiments, the protein, e.g., substantially non-pathogenic protein and/or proteinaceous exterior protein, comprises one or more glycosylated amino acids, e.g., 2, 3, 4, 5, 6, 7, 8, 9, 10, or more.

[0406] In some embodiments, the protein, e.g., substantially non-pathogenic protein and/or proteinaceous exterior protein comprises at least one hydrophilic DNA-binding region, an arginine-rich region, a threonine-rich region, a glutamine-rich region, a N-terminal polyarginine sequence, a variable region, a C-terminal polyglutamine/glutamate sequence, and one or more disulfide bridges.

[0407] In some embodiments, the genetic element comprises a nucleotide sequence encoding a capsid protein or a fragment of a capsid protein or a sequence having at least about 60%, 65%, 70%, 75%, 80%, 85%, 90% 95%, 96%, 97%, 98%, 99%, or 100% nucleotide sequence identity to any one of the nucleotide sequences encoding a capsid protein described herein, e.g., as listed in any of Tables 1-16 or 19. In some embodiments, the genetic element comprises a nucleotide sequence encoding a capsid protein or a functional fragment of a capsid protein or a nucleotide sequence having at least about 60%, 70% 80%, 85%, 90% 95%, 96%, 97%, 98%, 99%, or 100% sequence identity to any one of the nucleotide sequences described herein, e.g., as listed in any of Tables 1-16 or 19. In some embodiments, the substantially non-pathogenic protein comprises a capsid protein or a functional fragment of a capsid protein that is encoded by a capsid nucleotide sequence or a sequence having at least about 60%, 65%, 70%, 75%, 80%, 85%, 90% 95%, 96%, 97%, 98%, 99%, or 100% nucleotide sequence identity to any one of the nucleotide sequences described herein, e.g., as listed in any of Tables 1, 3, 5, 7, 9, 11, 13, or 15.

TABLE 15
Examples of viral sequences that encode viral proteins, e.g., capsid proteins.

| Accession # | Accession # | | |
|---|---|---|---|
| (protein | (nucleotide | | |
| sequence) | sequence) | Sequence | SEQ ID NO: |
| AAD45640.1 | AF122917.1 | ATGCACTTTTCTAGGATATCCAGGAAGAAAAGGCTACTGCTACTG | 92 |
| | | CACACAGTGCCAACTCCACAGAAAACTCTCAAACTTTTAAGAGGT | |
| | | ATGTGGAGTCCTCCCACTGACGATGAACGTGTCCGCGAGCGAAA | |
| | | ATGGTTTCTCGCAACTGTCTATTCTCACTCTGCTTTCTGTGGCTG | |
| | | CAATGATCCTGTCGGTCACCTCTGTCGCCTGGCTACTCTCTCTAA | |
| | | CCGTCCGGAGAACCCGGGACCCTCCGGGGGACGTCGTGCTCCT | |
| | | TCGATCGGGGTCCTACCCGCTCTCCCGGCTGCTACCGAGCAGC | |
| | | CAGGTGATCGAGCACCATGGCCTATGGGTGGTGGAGGAGACGC | |
| | | CGCAGAAGGTGGAAGAGATGGAGGAGAAGGCCCAGGTGGAGA | |
| | | CGCCCATGGAGGACCCGCAGACGCAGACCTGCTAGACGCCGTG | |
| | | GACGCCGCGGAACAGTAA | |
| AAD45641.1 | AF122917.2 | ATGGCCTATGGGTGGTGGAGGAGACGCCGCAGAAGGTGGAAGA | 93 |
| | | GATGGAGGAGAAGGCCCAGGTGGAGACGCCCATGGAGGACCC | |
| | | GCAGACGCAGACCTGCTAGACGCCGTGGACGCCGCGGAACAGT | |
| | | AAGGAGACGGAGGCGCGGGAGGTGGAGGAGGCGCTATAGGAG | |
| | | GTGGAGGAGAAAGGGCAGACGCAGGAGAAAAAAGAAACTTATAA | |
| | | TAAGACAATGGCAGCCAAACTATACCAGAAAGTGCAACATAGTA | |
| | | GGCTACATGCCAGTAATCATGTGTGGAGAAAACACTCTAATAAGA | |
| | | AACTATGCCACACACGCAGACGACTGCTACTGGCCGGGACCCTT | |
| | | TGGGGGCGGCATGGCCACCCAGAAATTCACACCCAGAATCCTG | |
| | | TACGATGACTACAAGAGGTTTATGAACTACTGGACCTCCTCAAAC | |
| | | GAGGACCTAGACCTCTGTAGATACAGGGGAGTCACCCTGTACTT | |
| | | TTTCAGACACCCAGATGTAGACTTTATCATCTTAATAAACACCAC | |
| | | ACCTCCATTCGTAGATACAGAGATCACAGGACCCAGCATACATC | |
| | | CGGGCATGATGGCCCTGAACAAGAGAGCCAGGTTCATCCCCAG | |
| | | CCTAAAGACTAGACCTGGCAGAAGACACATAGTAAAGATTAGAG | |
| | | TGGGGGCCCCCAAACTGTACGAGGACAAGTGGTACCCCCAGTC | |
| | | AGAACTCTGTGACGTGCCCCTGCTAACCGTCTACGCGACCGCAG | |
| | | CGGATATGCAATATCCGTTCGGCTCACCACTAACTGACACTCCT | |
| | | GTTGTAACCTTCCAAGTGTTGCGCAGCATGTACAACGACGCCCT | |
| | | CAGCACACTTCCCTCTAACTTTGAAAACGCAAGCAGTCCAGGCC | |
| | | AAAAACTTTACAAAGAAATATCTACATATTTACCATACTACAACAC | |
| | | CACAGAAACAATAGCACAACTAAAGAGATATGTAGAAAATACAGA | |
| | | AAAAAATGGCACAACGCCAAACCCGTGGCAATCAAAATATGTAAA | |
| | | CACTACTGCCTTCACCACTGCACTAAATGTTACAACTGAAAAACC | |
| | | ATACACCACCTTCTCAGACAGCTGGTACAGGGGCACAGTATACA | |
| | | AAGAAACAATCACTGAAGTGCCACTTGCCGCAGCAAAACTCTAT | |
| | | CAAAACCAAACAAAAAAGCTGCTGTCTACAACATTTACAGGAGG | |
| | | GTCCGAGTACCTAGAATACCATGGAGGCCTGTACAGCTCCATAT | |
| | | GGCTATCAGCAGGCCGATCCTACTTTGAAACAAAGGGAGCATAC | |
| | | ACAGACATCTGCTACAACCCCTACACAGACAGAGGAGAGGGCAA | |
| | | CATGGTGTGGATAGACTGGCTATCAAAAACAGACTCCAGATATG | |
| | | ACAAAACCCGCAGCAAATGCCTTATAGAAAAGCTACCCCTATGG | |
| | | GCAGCAGTATACGGGTACCCAGAATACTGTGCCAAGAGCACCG | |
| | | GAGACTCAAACATAGACATGAACGCCAGAGTAGTAATAAGGTGC | |
| | | CCCTACACCGTCCCCCAGATGATAGACACCAGCGACGAACTAAG | |
| | | GGGCTTCATAGTATACAGCTTTAACTTTGGCAGGGGCAAAATGC | |
| | | CCGGAGGCAGCAGCGAGGTACCCATAAGAATGAGAGCCAAGTG | |
| | | GTACCCCTGCCTGTTTCACCAAAAAGAAGTTCTAGAAGCCTTGG | |
| | | GACAGTCGGGCCCCTTCGCCTACCACTGCGACCAAAAAAAAGCA | |
| | | GTGCTAGGTCTAAAATACAGATTTCACTGGATATGGGGCGGAAG | |
| | | CCCCGTGTTTCCACAGGTTGTTAGAAACCCCTGCAAAGACACAC | |
| | | ACGGTTCCTCGGGCCCTAGAAAGCCTCGCTCAATACAAATCATT | |
| | | GACCCGAAGTACAACACACCAGAGCTCACAATCCACGCGTGGG | |
| | | ATTTCAGACGTGGCTTCTTTGGCTCAAAAGCTATTAAAAGAATGC | |
| | | AACAACAACCAACAGATGCTGAACTTCTTCCACCAGGCCGCAAG | |
| | | AGGAGCAGGCGAGACACAGAAGCCCTCCAAAGCAGCCAAGAAA | |
| | | AGCAAAAAGAAAGCTTACTTTTCAAACACCTCCAGCTCCAGCGAC | |
| | | GAATACCCCCATGGGAAAGCTCGCAGGCCTCGCAGACAGAGGC | |
| | | AGAGAGCGAAAAAGAGCAAGAGGGCAGTCTCTCCCAGCAGCTC | |
| | | CGAGAGCAGCTTTACCAGCAAAAGCTCCTCGGCAAGCAGCTCAG | |
| | | GGAAATGTTCCTACAACTCCACAAAATCCAACAAAATCAACACGT | |
| | | CAACCCTACCTTATTGCCAAGGGATCAGGCTTTAATCTGCTGGTC | |
| | | TCAGATTCAGTAA | |
| AAD45642.1 | AF122917.1 | ATGTTTGGAGACCCTAAACCATACAAACCCTCCAGCAACGACTG | 94 |
| | | GAAAGAGGAGTACGAGGCCGCTAAGTATTGGGACAGGCCCCCC | |
| | | AGATCTAACCTTAGAGATAACCCCTTCTATCCCTGGGCCCCCCC | |
| | | AAGCAATCCCTACAAAGTAAACTTTAAACTAGGCTTCCAATAA | |
| AAD45646.1 | AF122919.1 | ATGCACTTTTCTAGGATATCCAGAAAGAAAAGGCTACTGCTACTG | 95 |
| | | CAAACAGAGCCAGCTCCACAGAAGACTCTCAAACTTTTAAAAGGT | |
| | | ATGTGGAGTCCTCCCACTGACGATGAACGTGTCCGCGAGCGAAA | |
| | | ATGGTTCCTCGCCACTGTTTATTCTCACTCTGCTTTCTGTGGCTG | |
| | | CAATGATCCTGTCGGCCACCTCTGTCGCTTGGCTACTCTATCTAA | |
| | | CCGTCCGGAGAACCCGGGACCCTCCGGGGGACGTCGTGCTCCT | |
| | | TCGATCGGGATCCTACCCGCTCTCCCGGCTGCTACCGAGCAGC | |
| | | CCGGTGATCGAGCACCATGGCCTATGGGTGGTGGAGGAGACGC | |
| | | CGCAGAAGGTGGAAGAGATGGAGGAGAAGGCCCAGGTGGAGA | |
| | | CGCCCATGGAGGACCCGCAGACGCAGACCTGCTAGACGCCGTG | |
| | | GACGCCGCAGAACAGTAA | |
| AAD45647.1 | AF122919_2 | ATGGCCTATGGGTGGTGGAGGAGACGCCGCAGAAGGTGGAAGA | 96 |
| | | GATGGAGGAGAAGGCCCAGGTGGAGACGCCCATGGAGGACCC | |
| | | GCAGACGCAGACCTGCTAGACGCCGTGGACGCCGCAGAACAGT | |
| | | AAGGAGACGGAGGCGCGGGAGGTGGAGGAGGCGCTATAGGAG | |
| | | GTGGAGGAGAAAGGGCAGACGCGGGAGAAAAAAGAAACTTATA | |
| | | ATAAAACAATGGCAGCCAAACTATACCAGAGAGTGCAACATAGTA | |
| | | GGCTACATGCCAGTAATCATGTGTGGAGAGAACACTCTAATAAG | |
| | | AAACTATGCCACACACGCAGACGACTGCTACTGGCCGGGACCCT | |
| | | TTGGGGGCGGCATGGCCACCCAGAAATTCACACTCAGAATCCTG | |
| | | TACGATGACTACAAGAGGTTTATGAACTACTGGACCTCCTCAAAC | |
| | | GAGGACCTAGACCTCTGTAGATACAGGGGAGTCACCCTGTACTT | |
| | | TTTCAGAAACCCAGATGTAGACTTTATCATCCTCATAAACACCAC | |
| | | ACCTCCGTTCGTAGATACAGAGATCACAGGACCCAGCATACATC | |
| | | CGGGCATGATGGCCCTCAACAAAAGAGCCAGGTTCATCCCCAG | |
| | | CCTAAAAACTAGACCTGGCAGAAGACACATAGTAAAGATTAAAGT | |
| | | GGGGGCCCCCAAACTGTACGAGGACAAGTGGTACCCCCAGTCA | |
| | | GAACTCTGTGACATGCCCCTACTAACCGTCTACGCCACCGCAGC | |
| | | GGATATGCAATATCCGTTCGGCTCACCACTAACTGACACTCCTGT | |
| | | TGTAACCTTCCAAGTGTTGCGCAGCATGTACAACGACGCCCTTA | |
| | | GCATACTTCCCTCTAACTTTCAAAGCCCAGACAGTCCAGGCCAA | |
| | | AAACTTTACGAACAAATATCTAAGTATTTACCATACTACAACACCA | |
| | | CAGAAACAATGGCACAACTAAAGAGATATATAGAAAATACAGAAA | |
| | | AAAATACCACATCGCCAAACCCATGGCAAACAAAATATGTAAACA | |
| | | CTACTGCCTTCACCACTCCACAAACTGTTACAACTCAACAGCCAT | |
| | | ACACCAGCTTCTCAGACAGCTGGTACAGGGGCACAGTATACACA | |
| | | AACGAAATCACTAAGGTGCCACTTGCCGCAGCAAAAGTGTATGA | |
| | | AACTCAAACAAAAAACCTGCTGTCTACAACATTTACAGGAGGGTC | |
| | | AGAGTACCTAGAATACCATGGAGGCCTGTACAGCTCCATATGGC | |
| | | TATCAGCAGGCCGATCCTACTTTGAAACAAAGGGAGCATACACA | |
| | | GACATCTGCTACAACCCCTACACAGACAGAGGAGAGGGCAACAT | |
| | | GGTGTGGATAGACTGGCTATCAAAAACAGACTCCAGATATGACA | |
| | | AAACCCGCAGCAAATGCCTTATAGAAAAGCTACCCCTATGGGCA | |
| | | GCAGTATACGGGTACGCAGAATACTGTGCCAAGAGCACCGGAG | |
| | | ACTCAAACATAGACATGAACGCCAGAGTAGTAATTAGGTGCCCC | |
| | | TACACCACCCCCCAGATGATAGACACCAGCGACGAACTAAGGG | |
| | | GCTTCATAGTATACAGCTTTAACTTTGGCAGGGGCAAAATGCCC | |
| | | GGAGGCAGCAGCGAGGTACCCATTAGAATGAGAGCCAAGTGGT | |
| | | ACCCCTGCCTACTTCACCAAAAAGGAGTTCTAGAAGCCTTAGGA | |
| | | CAGTCAGGCCCCTTCGCCTACCACCGCGACCAAAAAAAAGCAGT | |
| | | GCTAGGTCTAAAATACAGATTTCACTGGATATGGGGCGGAAACC | |
| | | CCGTGTTTCCACAGGTTGTTAGAAACCCCTGCAAAGACACACAC | |
| | | GGTTCCTCGGGCCCTAGAAAGCCTCGCTCAATACAAATCATTGA | |
| | | CCCGAAGTACAACACACCAGAGCTCACAATCCACGCGTGGGATT | |
| | | TCAGACGTGGCTTCTTTGGCCCAAAAGCTATTAAGAGAATGCAA | |
| | | CAACAACCAACAGATGCTGAACTTCTTCCACCAGGCCGCAAGAG | |
| | | GAGCAGGCGAGACACCGAAGCCCTCCAAAGCAGCCAAGAAAAG | |
| | | CAGAAAGAAAGCTTACTTTTCAAACAGCTCCAGCTCCGGCGACG | |
| | | AGTACCCCCGTGGGAAAGCTCGCAGGCCTCGCAGACAGAGGCA | |
| | | GAGAGCGAAAAAGAGCAAGAGGACAGTCTCTCCCAGCAGCTCC | |
| | | GAGAGCAGCTTCACCAGCAAAAGCTCCTCGGCAAGCAGCTCAG | |
| | | GGAAATGTTCCTACAACTCCACAAAATCCAACAAAATCAACACGT | |
| | | CAACCCTACCCTATTGCCAAAAGATCAGGCTTTAATATGCTGGTC | |
| | | TCAGATTCAGTAA | |
| AAD45648.1 | AF122919_3 | ATGTTCGGAGACCCTAAACCATACAAACCCTCCAGCAACGACTG | 97 |
| | | GAAAGAGGAGTACGAGGCCGCTAAATATTGGGACAGGCCCCCC | |
| | | AAGCAATCCCTACAAAGTAAACTTTAAACTAGGCTTTCAATAA | |
| AAG16247.1 | AF298585_1 | ATGGCTGAGTTTTCCACGCCCGTCCGCAGCGGTGAAGCCACGG | 98 |
| | | AGGGACCTCAGCGCGTCCCGAGGGCGGGTGCCGAAGGTGAGT | |
| | | TTACACACCGCAGTCAAGGGGCAATTCGGGCTCGGGACTGGCC | |
| | | GGGCTATGGGCAAGGCTCTTAA | |
| AAG16248.1 | AF298585_2 | ATGTTTCTCGGTAAACTTTACAGAAAGAAAAGGAAAGTGCTTCTG | 99 |
| | | CAGACTGTGCCAGACCCACAGAAGGCTAGGCGGCTTCTGATTAT | |
| | | GTGGCAGCCCCCCGTGCACAAAGTACCCGGGATCGAGAGAAAC | |
| | | TGGTACGAGAGTTGCTTTCGATCCCATGCTGCTGTGTGTGGCTG | |
| | | TGGCGACTTTGTTGGCCATCTTAATCATCTGGCAGCTACTCTGG | |
| | | GTCGCCCTCCGCGTTCTCGGCACCCCGGGGGCCCCGGCACTCC | |
| | | GCAGATAAGAAACCTGCCAGCGCTCCCGGCACCCCAGGGTGAG | |
| | | CCCGGTGACAGAGCGCCATGGCCTACGGATGGTGGGGCCGCC | |
| | | GGCGCCGCTGGAGAAGATGGAGGACGCGGCGCAGACCGTGGA | |
| | | GAACCAGGAGACGTAGAAGACGACGCGCTCCTCGCCGCTTTCG | |
| | | ACCTCGTCGAAGAGTAA | |
| AAG16249.1 | AF298585_3 | ATGGCCTACGGATGGTGGGGCCGCCGGCGCCGCTGGAGAAGA | 100 |
| | | TGGAGGACGCGGCGCAGACCGTGGAGAACCAGGAGACGTAGAA | |
| | | GACGACGCGCTCCTCGCCGCTTTCGACCTCGTCGAAGAGTAAG | |
| | | GAGGCGCAGGGGGCGGTGGCGCAGACGGTATAGAAAATGGAG | |
| | | GAGACGCAGGGGCAGACGGACGCACAGAAAAAAGATAATCATA | |
| | | AAACAGTGGCAGCCGAACTTTATAAGACGCTGCTACATAATAGG | |
| | | CTACCTGCCTCTCATATTCTGTGGCGAGAACACCACCGCCAATA | |
| | | ACTTTGCCACCCACTCGGACGACATGATAGCCAAAGGACCGTGG | |
| | | GGGGGGGGCATGACTACCACTAAGTTCACTTTGAGAATCCTGTA | |
| | | CGACGAGTTTACCAGGTTTATGAACTTCTGGACTGTCAGTAACGA | |
| | | AGACCTAGACCTGTGTAGATACGTGAGCTGCAAACTGATATTCTT | |
| | | TAAGCACCCCACGGTAGACTTTATAGTCAGGATAAACACAGAGC | |
| | | CTCCGTTCCTAGACACTAACCTGACCGCGGCACAGATTCACCCG | |
| | | GGCATCATGATGCTAAGCAAAAAACACATACTCATACCCTCTCTA | |
| | | AAGACCAGGCCTAGCAGAAAACACAGGGTGGTCGTCAGGGTGG | |
| | | GCCCACCTAGACTGTTTCAAGACAAGTGGTACCCCCAGTCAGAC | |
| | | CTGTGTGACACAGTTCTGCTTTCCGTGTTTGCAACGGCCTGTGA | |
| | | CTTGCAATATCCGTTCGGCTCACCACTAACTGACAACCCTTGCGT | |
| | | CAACTTCCAGATTCTGGGGCACCAGTACAAAAACCACCTTAGTAT | |
| | | TAGCTCCACAAACGATACCACTAACAAACAACACTATGACAACAC | |
| | | TTTATTTAACAAAATAGTATTATATAACACTTTTCAAACAATAGCTC | |
| | | AGCTCAAAGAAACAGGACAACTCACAAACTTATGGAACGAAGTA | |
| | | CAAAACACAACAGCACTGTCACCAAAAGGCACAAATGCAACTATA | |
| | | AGCAAAGACACCTGGTACAAAGGAAACACATACAAAGACAAGAT | |
| | | TAAAGAGTTAGCAGAAAAAACTCGAAGTAGATTTGCAGCTGCAAC | |
| | | AAAAGCAGCCCTGCCAAACTACCCTACAATCATGTCCACAGACC | |
| | | TGTATGAGTACCACTCAGGCATATACTCCAGCATATTCCTAGCAG | |
| | | CAGGCAGGAGCTACTTTGAGACCCCGGGGGCCTACACAGACGT | |
| | | CATATACAACCCTTTTACAGACAAAGGCACAGGAAACATGGTCTG | |
| | | GATAGACTACCTCACAAAACCAGACTCCATATACACAAAGAACAA | |
| | | AAGCAAATGCGAGATATTTGACGTACCCCTGTGGGCCACCTTCA | |
| | | CAGGATACTCAGAATTCTGTTCAAAAGTTACAGGAGACACCGCC | |
| | | ATTCACCTAACTGCCAGAGTAGTAGTCAGATGCCCCTACACCGA | |
| | | GCCCATGCTAATAGACCACTCAGACCCCAACAGGGGCTTTGTAC | |
| | | CATACTCCTTTAACTTTGGAGAGGGCAAGATGCCCGGAGGCTCC | |
| | | TCAAAAGTACCCATAAGAATGAGAGCCAAGTGGTACGTGAACAT | |
| | | GTTTCACCAGCAAGAATTCATGGAGGCCATAGTTGAGAGCGGAC | |
| | | CGCTTGCTTACAAGGGCGACATAAAATCAGCGGTACTCACCATG | |
| | | AAATACAGATTCCACTGGAAATGGGGCGGAAACCCTATATCCAA | |
| | | ACAGGTCGTCCGGAATCCCTGCTCCACCTCCAGCACCTCCGCG | |
| | | GGCCATCGAGGACCTCGCAGCATACAAGTCGTTGACCCGAAGC | |
| | | ACGTTACCCCGGAAGTCACCTGGCACTCGTGGGACATCAAGCG | |
| | | AGGTCTCTTTGGCAAAGCAGGTATTAAGAGAATGCAACAAGAAT | |
| | | CAGATGCTCTTTACATTCCTACAGGACCACTCAAGAGGCCACGG | |
| | | AGGGACACCAACGCCCAAGACCCAGAAGAGCAAAACGAAAGCT | |
| | | CAGGTTTCAGAGTCCAGCAGCGACTCCCCTGGGTCCACTCCAGC | |
| | | CAAGAAACGCAAAGCTCCCAAGAGGAGATGCAAGCGGAGGGGA | |
| | | CGGTACAAGAACAACTCCTCCTCCAGCTCCGAGAGCAGCGAGTA | |
| | | CTCCGGTTCCAGCTCCAACAGCTCGCCAGCCAAGTCCTCAAAGT | |
| | | GCAAGCAGGGCAAGGCCTACACCCCCTATTATCTTCCCAAGCGT | |
| | | AA | |
| AAG16250.1 | AF298585_4 | ATGTTTGAGCCCCAGGGTCCCAAACCCATACAGGGCTACAACGA | 101 |
| | | TTGGTTAGAAGAGTACACCTGCTGTAAATTCTGGGACAGGCCTC | |
| | | CCAGAAAGCTACACACAGATACACCCTTTTACCCCTGGGCACCA | |
| | | AAACCCCCAGACCAAGTGAGAGTCTCCTTTAAACTTAACTTCCAA | |
| | | TAA | |
| AAL37158.1 | AF315076_2 | ATGTTTCTTGGCAGGGCCTGGAGAAAGAAAAGGCAAGTGCCACT | 102 |
| | | GCCGACACTGCCAGTGGTGCCGCTTCCACAACCTTCACCTATGA | |
| | | GCAGCCAGTGGAGACCCCCGGTTCACAATGTCCAGGGGCTGGA | |
| | | GCGCAATTGGTGGGAGTGCTTCTTCCGTTCTCATGCTTGTTTTTG | |
| | | TGGCTGTGGTGATGCTATTACTCATATTAATCATCTGGCGACTCG | |
| | | TTTTGGACGTCCTCCTACTACCTCAACTCCCCGAGGACCGCAGG | |
| | | CACCTCCAGTGACTCCGTACCCGGCCCTGCCGGCCCCAGAGCC | |
| | | TAGCCCTGAGCCATGGCGTGGCGCCGGTGGCGATGGCGGCCG | |
| | | TGGTGGAGACGCCGGAGGCGCCGCCGGTGGAGAAGGAGACGG | |
| | | AGGAGACCCAGACGACGCCGCCCTTATCGACGCCGTCGACCTC | |
| | | GCAGAGTAA | |
| AAL37157.1 | AF315076_1 | ATGGCGTGGCGCCGGTGGCGATGGCGGCCGTGGTGGAGACGC | 103 |
| | | CGGAGGCGCCGCCGGTGGAGAAGGAGACGGAGGAGACCCAGA | |
| | | CGACGCCGCCCTTATCGACGCCGTCGACCTCGCAGAGTAAGGA | |
| | | GGCGCAGGGGGCGGTGGAGGCGCGCGTACAGACGTTGGGGGC | |
| | | GACGCAGACGCAGACGCAGGCACAAAAAGAAACTTGTACTGACT | |
| | | CAGTGGCAACCAGCAGTAGTTAAGAGGTGCCTAATAGTGGGCTT | |
| | | TGACCCCCTTATAATATGTGGCATTAACAGAACAATATTTAACTAC | |
| | | ACTACACACTCTGAAGACTTTACTTTTAACAACGACAGCTTTGGA | |
| | | GGGGGGCTCTGTACCGCTCAGTACACACTAAGAATCCTTTTCCA | |
| | | AGAAAAGCTGGCCCAGCACAACTTCTGGTCAGCTAGCAACGAAG | |
| | | ACCTAGACCTTGCCAGGTACCTAGGAGCCACAATAGTACTTTAC | |
| | | AGACACCCTACAGTAGACTTCTTAGTTAGAATTCGCACCAGTCCT | |
| | | CCCTTTGAGGACACAGACATGACAGCCATGACACTACATCCAGG | |
| | | CATGATGATGCTAGCTAAAAAGACAATTAAAATTCCCAGTCTTAA | |
| | | AACAAGACCGTCCAGAAAACACGTAGTAAGGATTAGAGTAGGGG | |
| | | CCCCTAAACTATTTGAAGACAAGTGGTACCCCCAGAACGAGCTA | |
| | | TGTGATGTAACTCTGCTAACCATACAGGCAACCACAGCTGATTTC | |
| | | CAATATCCGTTCGGCTCACCACTAACGAACTCCCCCTGTTGCAA | |
| | | CTTCCAGGTTCTTAACAGTAACTATGACAATGCACATTCCATACTT | |
| | | AACTTGTCAAACGAACCAACAAACAAATGGCACACCTATAGAAAT | |
| | | AACTGCTATAAATTTCTACTAGAACAGTACAGCTACTACAACACT | |
| | | AAACAAGTAGTAGCACAACTTAAATATAAATGGAACCCTAATCAA | |
| | | AACCCTACTATGCCAAATACAAGCAATGCATCACTTTCTAAAAAA | |
| | | CCTGATGACCTTACTAAAACCAAAACAACAAACGAGTATCCACAT | |
| | | TGGGACACCCTATATGGTGGTTTAGCATATGGACACAGCACTGT | |
| | | AACACCTGGCACTACCTCATCACCAACAGACCTAAAAACACAAAT | |
| | | GCTTACAGGCAACGAATTTTATACAACAGCAGGCAAAAAGTTAAT | |
| | | AGATACATTTCACCCAATTCCTTACTATGAAAACGGATCTTCTAAA | |
| | | GCCAACACCAACATATTTGACTACTACACAGGCATGTACAGTAGT | |
| | | ATTTTCCTGTCTTCAGGCAGATCAAACCCAGAAGTAAAGGGCAG | |
| | | CTACACAGACATCTCTTACAACCCTCTGACAGACAAGGGAGTAG | |
| | | GTAACATGATTTGGATAGACTGGCTCACTAAAGGAGACACAGTAT | |
| | | ACGACCCCAAAAAAAGCAAGTGCCTACTCTCAGACTTTCCATTGT | |
| | | GGTCACTTTGTTATGGATACCCAGACTACTGCAGAAAACAAACC | |
| | | GGAGACTCAGGTATTTACTATGACTACAGAGTACTTATAAGATGT | |
| | | CCATACACATACCCTCAATTAATAAAACACAACGACAAATACTTT | |
| | | GGCTTCGTAGTGTACAGCGAAAACTTTGGACTGGGGCGACTACC | |
| | | AGGAGGCAACCCTAACCCCCCAACTAGAATGAGACTGCACTGGT | |
| | | ACCCTAATATGTTCCACCAAACAGAAGTACTAGAGTGCATAGCTC | |
| | | AAAGCGGACCGTTTGCTTATCATGGAGACGAGAGAAAAGCTGTT | |
| | | CTGACTGCCAAATACAAGTTCAGATGGAAGTGGGGAGGCAATCC | |
| | | TGTGTTTCAACAGGTTCTCCGAGACCCCTGCACCGGAGGTGCCG | |
| | | TGGCGCCCCACACCAGTCGACACCCTCGTGCAATACAAGTCCAT | |
| | | GACCCGAAGTATCAGGCCCCGGAGTACCTCTTCCACAAATGGGA | |
| | | CTTCAGAAGGGGACTGTTTAGCACTAAAGGTATTAAGAGAGTGT | |
| | | CAGAACAACCAGTACATGATGAGTATTTTACAGGGAGCAGCAAG | |
| | | AGACCCAAGAAAGACACCAACCCAAGCCCCCAAGGAGAAGAGC | |
| | | AAAAAGAAGGCTCGCGTTTCAGAGTCCCAGAGCTCAGACCCTGG | |
| | | CTCCCCTCCAGCCAGGAAACGCAGAGCCAAAGCGAGCAAGAAG | |
| | | AAACAGCCCCGAAAACGGTCCAAGAGCAGCTACAAGAACAACTC | |
| | | CAGCAGCAGCAGCTCATGGGAATCCAGCTCAGAAACGTCTGTCT | |
| | | CCAGCTCGCAAGAGTCCAAGCGGGGCACAGTCTCCACCCCGTT | |
| | | TTCCAATGCCATGCATAA | |
| AAL37159.1 | AF315076_3 | ATGACCCGAAGTATCAGGCCCCGGAGTACCTCTTCCACAAATGG | 104 |
| | | GACTTCAGAAGGGGACTGTTTAGCACTAAAGGTATTAAGAGAGT | |
| | | GTCAGAACAACCAGTACATGATGAGTATTTTACAGGGAGCAGCA | |
| | | AGAGACCCAAGAAAGACACCAACCCAAGCCCCCAAGGAGAAGA | |
| | | GCAAAAAGAAGGCTCGCGTTTCAGAGTCCCAGAGCTCAGACCCT | |
| | | GGCTCCCCTCCAGCCAGGAAACGCAGAGCCAAAGCGAGCAAGA | |
| | | AGAAACAGCCCCGAAAACGGTCCAAGAGCAGCTACAAGAACAAC | |
| | | TCCAGCAGCAGCAGCTCATGGGAATCCAGCTCAGAAACGTCTGT | |
| | | CTCCAGCTCGCAAGAGTCCAAGCGGGGCACAGTCTCCACCCCG | |
| | | TTTTCCAATGCCATGCATAAACAAAGTTTTTATTTTCCCTGA | |
| AAL37160.1 | AF315077_1 | ATGTTTCTCGGTAAACTTTACAGAAAGAAAAGGAAACTGCTACTG | 105 |
| | | CAAGCTGTGCGAGCTCCACAGGCGCCATCTTCCATGAGCTCCTC | |
| | | CTGGCGAGTGCCCCGCGGCGATGTCTCCGCCCGCGAGCTATGT | |
| | | TGGTACCGCTCAGTTCGAGAGAGCCACGATGCTTTTTGTGGCTG | |
| | | TCGTGATCCTGTTTTTCATCTTTCTCGTCTGGCTGCACGTTCTAA | |
| | | CCATCAGGGACCTCCGACGCCCCCCACGGACGAGCGCCCGTCG | |
| | | GCGTCTACCCCAGTGAGGCGCCTGCTGCCGCTGCCCTCCTACC | |
| | | CCGGCGAGGGTCCCCAGGCTAGATGGCCTGGTGGAGATGGAGA | |
| | | AGGCGCTGGTGACGCCCGCGGAGGCGCTGGAGATGGCGGCGC | |
| | | CCGCGCAGGCGAAGAAGAGTACCGGCCCGAAGACCTCGACGAG | |
| | | CTGTTCGGCGCTACCGAACAAGAACAGTAA | |
| AAL37161.1 | AF315077_2 | ATGCCAGTTATCTGGGCGGGCATGGGCACGGGGGGCCAAAACT | 106 |
| | | ACGCCGTCCGCTCAGATGACTTTGTAGTAGACAAGGGCTTCGGG | |
| | | GGCTCCTTCGCTACAGAGACTTTCTCCTTGAGAGTACTGTATGAC | |
| | | CAGCACCAGAGGGGCTTTAACCGGTGGTCCCACACCAACGAGG | |
| | | ACCTAGACCTTGCCCGTTACAGGGGATGCAAATGGACCTTTTAC | |
| | | AGACACCCAGACACTGACTTTATAGTGTACTTCACTAACAATCCC | |
| | | CCCATGAAAACTAACCAGTACACTGCCCCTCTCACCACTCCTGG | |
| | | AATGCTCATGAGAAGCAAATATAAGATACTAATACCTAGTTTTAAA | |
| | | ACAAAACCCAAGGGAAAAAAGACAATAAGCTTCAGAGCCAGACC | |
| | | CCCAAAACTATTCCAAGACAAGTGGTACACTCAACAAGACCTCTG | |
| | | CCCTGTGCCCCTCATCCAACTGAACTTAACCGCAGCTGATTTCAC | |
| | | ACATCCGTTCGGCTTACCACTAACTGACTCTCCTTGCGTAAGGTT | |
| | | CCAAGTCCTCGGAGACTTGTACAATAACTGTCTCAATATAGACCT | |
| | | TCCGCAATTTGATGACAAGGGTACAATTTCAGACGCATCCTCTTA | |
| | | CAGTAGAGATAATAAGCAGCAGTTAGAAGAATTATATAAAACTCT | |
| | | ATTTGTTAAAAAGGGCTGCGGACACTACTGGCAAACATTCATGAC | |
| | | CAATAGCATGGTAAAAGCACACATAGATGCTGCACAGGCACAAA | |
| | | ACCATCAACAAGACACCTCAGGCCCTCAAAGTGCAAAAGATCCA | |
| | | TTTCCAACAAAACCTGACAGAAACCAATTTGAACAATGGAAAAAC | |
| | | AAATTCACAGACCCCAGAGACAGCAACTTTCTCTTTGCCACTTAT | |
| | | CACCCAGAAAACATTACACAGACTATCAAAACAATGAGAGACAAT | |
| | | AACTTTGCTCTAGAAACTGGAAAGAATGACCTTTATGGTGATTAT | |
| | | CAGGCCCAGTATACTAGAAACACTCACCTTCTAGACTACTACCTG | |
| | | GGCTTCTACAGCCCCATATTCTTGTCCAGTGGCAGATCCAATACT | |
| | | GAATTCTTTACTGCCTACAGAGACATAATATACAATCCACTACTA | |
| | | GACAAAGGCACAGGTAATATGATTTGGTTCCAATACCACACAAAG | |
| | | ACTGACAACATATTTAAAAAACCAGAGTGCCACTGGGAAATACTA | |
| | | GACATGCCCCTGTGGGCCCTCTGCAACGGCTACAAAGAGTACCT | |
| | | AGAGAGCCAAATAAAATATGGTGATATCTTAGTAGAAGGCAAAGT | |
| | | CCTCATAAGATGCCCATACACCAAACCTCCCCTAGCAGACCCCA | |
| | | ACAACAGTCTAGCAGGATATGTAGTCTACAACACAAACTTTGGAC | |
| | | AAGGCAAGTGGATCGACGGCAAGGGCTACATACCCCTAAGACA | |
| | | CAGGAGCAAGTGGTATGTCATGCTCATGTACCAGACGGACGTAC | |
| | | TCCATGACCTAGTGACTTGTGGACCCTGGCAATACAGAGACGAT | |
| | | AATAAGAACTCTCAACTGATAGCCAAGTATAGATTTACTTTCTACT | |
| | | GGGGAGGTAACATGGTACATTCTCAGGTCATCAGGAACCCGTGC | |
| | | AAAGACACCCAAGTATCCGGCCCCCGTCGACAGCCTAGAGAGAT | |
| | | ACAAGTCGTTGACCCGCAACTCATCACCCCGCCGTGGGTCCTCC | |
| | | ACTCGTTCGACCAGAGACGAGGAATGTTTACTGAGACAGCTATC | |
| | | AGACGTCTGCTCAGACAACCACTACCTGGCGAGTATGCTCCTCC | |
| | | AGCACTCAGGGTCCCGCTCCTCTTTCCCTCCTCAGAGTTCCAAC | |
| | | GAGAGGGAGAAGGTGCAGAAAGCGACTTATCTTCCCCGGCCAA | |
| | | AAGACCACGACTCTGGCAAGAAGAGGACAGCGAGACGCAGACG | |
| | | CAGTCCTCGGAGGGGCCGGCGGAGACGACGAGGGAGCTCCTC | |
| | | GAGCGAAAGCTCAGAGAGCAGCGAGTCCTCAACCTCCAACTCCA | |
| | | GCAATTCGCCGTACAACTCGCCAAGACCCAAGCGAACCTCCACA | |
| | | TAAACCCCTTATTATACTCCCAGCAGTAA | |
| AAL37162.1 | AF315077_3 | ATGCTCCTCCAGCACTCAGGGTCCCGCTCCTCTTTCCCTCCTCA | 107 |
| | | GAGTTCCAACGAGAGGGAGAAGGTGCAGAAAGCGACTTATCTTC | |
| | | CCCGGCCAAAAGACCACGACTCTGGCAAGAAGAGGACAGCGAG | |
| | | ACGCAGACGCAGTCCTCGGAGGGGCCGGCGGAGACGACGAGG | |
| | | GAGCTCCTCGAGCGAAAGCTCAGAGAGCAGCGAGTCCTCAACC | |
| | | TCCAACTCCAGCAATTCGCCGTACAACTCGCCAAGACCCAAGCG | |
| | | AACCTCCACATAA | |
| CAF05717.1 | AJ620212.1 | ATGTACTTTTCCAGAAAAAGAAGACCCAAGAAGGAGAGGCCGCT | 108 |
| | | GCCACTGCGATACGTGTGTGGCCTACCGCCTAGCAGGCCTGAT | |
| | | CCGATGAGCTGGCGTCCACCTGCCCACGATGTCCCAGGACAAG | |
| | | AGGGCCTGTGGTACCGATCAGTTTTTACTTCTCATGGCGCTTTTT | |
| | | GTGGTTGCGGTGATTTTGTGGGTCATCTTCAGAGACTTAGCGAA | |
| | | CGCCTGGGTAGACCCCAACCACCAAGACCACCGGGCGAGCCGC | |
| | | CGGGCCCTGCTGTGAGAGTTCTGCCTGCCCTGCCGCCTCCAGT | |
| | | ACCTGAACCAAGAAGACACGTCCAGAGAGAGAACCCGGGATGT | |
| | | GGTGGTGGAGACGCCGCAGATGGAGGGCCCCATGGAGAAGGA | |
| | | GGCGATGGAGACGACGCAGACCTCGGACCAGAAGATTTAGACG | |
| | | AGCTGCTCGACGTCCTAGACGCCCCAGAGTAA | |
| CAF05718.1 | AJ620212.1 | ATGTGGTGGTGGAGACGCCGCAGATGGAGGGCCCCATGGAGAA | 109 |
| | | GGAGGCGATGGAGACGACGCAGACCTCGGACCAGAAGATTTAG | |
| | | ACGAGCTGCTCGACGTCCTAGACGCCCCAGAGTAAGGAGACCT | |
| | | CGGCGCCGCAGGGGGTGGGCTCGTAGATATAGACTTAGAAGGA | |
| | | GGCGAAGGAGGAGAAGAAGGAGAAAGCTTATACTAACACAATGG | |
| | | CAGCCAGCAAAAATAAGAAAATGTCTAGTAATAGGTTATCTTGCT | |
| | | CTAGTACTATGTGGGAACGGGACATTCAGTAAAAACTATGCCTC | |
| | | CCACTCAGATGACTATGTACAGAAAGGACCCTTTGGAGGGGGAC | |
| | | TGAGCAGCATGAGATTTAACATGAGAATACTATATGATCAATTTA | |
| | | AAAGACACCTTAACTTCTGGACACACACAAACCAGGACCTAGAC | |
| | | CTAGTTAGATACAGAGGCTGCACCATGACATTTTATAGACACCCA | |
| | | GAGGTGGACTTCATAGTAAAATTCAACAGAAAACCTCCATTCCTA | |
| | | GACACAATAGTATCAGGTCCAGCCATGCACCCAGGCATGCTAAT | |
| | | GACAACAAAACACAAAATACTAGTAAAAAGCTTTAAAACAAAACC | |
| | | CAAAGGAAAAGGCACAGTAAAGGTGCGCATTCGCCCCCCCACA | |
| | | CTCTTTGACGACCGTTGGTACTTTCAACATGACATCTGCAAAACC | |
| | | ACACTGTTCACCATTAGCGCAACACCATGTGACCTGCGGTTTCC | |
| | | GTTCTGCTCACCACAAACTGACAACCCTTGCGTCAACTTCCTAGT | |
| | | TCTTGCAGGAGTGTATAACGGCAAACTTAGCATAGAACCCACAA | |
| | | ACGTAGAATCACAATATAATTCACTACTTTCAGCTATAGAGACAC | |
| | | ACACCCAAGGCACTCTATTTAATACATTTAAAACACCAGAAATGA | |
| | | TAAAGTGCCCCCCAGCAGTAAAAGCCCCAGAAACTGGAGACATA | |
| | | TCCACAAACTGCTACAAAAAACTAGACATCGCCTGGGGAGACAC | |
| | | TATATGGAACCAAAGCACCATAGGCAACTTTAAAAAGAACACAGA | |
| | | GAACTTGTGGAATGCAAGACACAATCAAACAATGACTGGTAGCA | |
| | | AATACCTAAACTACAGAACAGGAATATACAGTGCCATATTCCTTT | |
| | | CAGCAGGCAGACTGTCACCAGACTTTCCAGGACTATACAATGAC | |
| | | ATAGTATACAATCCCACCACAGACGAAGGCATAGGAAACATTGT | |
| | | GTGGATAGACTGGTGTACAAAAGCAGACTGCAACTTCAATGAGA | |
| | | CACAGTCCAAAGGAGTAATAAAAGACATTCCACTGTGGGCAGCA | |
| | | CTGTTTGGCTATGTAGACTTTCTAAAAAAGACATTTAAAGACGAC | |
| | | CAGCTAGACAAAACTGCCAGACTCACTCTCATAAGCCCCTATACA | |
| | | AAGCCTCAACTAATAGGACCTACACAACCCAACAAAGGGTTTGTT | |
| | | CCGTACGACTACAACTTTGGCAGAGCACACATGCCCTCCGGAGA | |
| | | ATCCTACATACCTATGTACTACAGATTTAGATGGTACATCTGCCT | |
| | | ATTTCACCAACAAAAGTTTATAGACGACATTGTAAGCAGCGGGCC | |
| | | CTTCGCATACCACGGCTCACAGCCCTCAGCAACTCTCACCACTA | |
| | | AATACAAATTCCACTTTCTCTTTGGGGGCAACCCCGTTCCCCAAC | |
| | | AGACTGTCAGAGACCCTTGTAACCAACCAGTCTTTGACATTCCCG | |
| | | GAGCCGGTGGACTCCCTCGTCCGATACAAGTCGTTGACCCGAAA | |
| | | TACGTCAACGAAGGCTACACGTTCCACGCCTGGGACTTCCGTAG | |
| | | AGGGCTCTTTGGCCAAGCAGCTATTAAAAGAGTGTCGGGAGAAC | |
| | | AAACAAATGCTTCACTTTATTCATCAGGTCCAAAACGGCCAAGAA | |
| | | CAGAAATTCCTCCAGAAAATGCAGAAGAAGGCTCATATTCCAGG | |
| | | GAACAAAAACTCCAGCCCTGGCTCGACTCGAGCGACCAGGAAG | |
| | | AGAGCGAGACAGAAGCCCCAGAAGAAGAAGCGACCTCGCCGCC | |
| | | GTCGCTACAGCTCCAGCTCAAGCAGCAGATCAGGGAGCAGCGA | |
| | | CAACTCAGATGTGGAATCCAACACCTCTTCCAGCAACTAGTGAAA | |
| | | ACCCAGCAAAACTTGCATATCGACCCATGCCTACAATAG | |
| CAF05719 .1 | AJ620213.1 | ATGTACTTTTCCAGAAAAAGAAGACCCAAGAAGGAGAGGCCGCT | 110 |
| | | GCCACTGCGATACGTGTGTGGCCTACCGCCTAGCAGGCCTGAT | |
| | | CCGATGAGCTGGCGTCCACCTGCCCACGATGTCCCAGGACAAG | |
| | | AGGGCCTGTGGTACCGATCAGTTTTTACTTCTCATGGCGCTTTTT | |
| | | GTGGTTGCGGTGATTTTGTGGGTCATCTTCAGAGACTTAGCGAA | |
| | | CGCCTGGGTAGACCCCAACCACCAAGACCACCGGGCGGACCGC | |
| | | CGGGCCCTGCTGTGAGAGCTCTGCCTGCCCTGCCGCCTCCGGA | |
| | | ACCTGAACCAAGAAGACACGTCCAGAGAGAGAACCCGGGATGT | |
| | | GGTGGTGGAGACGCCGCAGATGGAGGGCCCCATGGAGAAGGA | |
| | | GGCGATGGAGACGACGCAGACCTCGGACCAGAAGATTTAGACG | |
| | | AGCTGCTCGACGTCCTAGACGCCCCAGAGTAA | |
| CAF05720.1 | AJ620213.1 | ATGTGGTGGTGGAGACGCCGCAGATGGAGGGCCCCATGGAGAA | 111 |
| | | GGAGGCGATGGAGACGACGCAGACCTCGGACCAGAAGATTTAG | |
| | | ACGAGCTGCTCGACGTCCTAGACGCCCCAGAGTAAGGAGACCT | |
| | | CGGCGCCGCAGGGGGTGGGCTCGTAGATATAGACTTAGAAGGA | |
| | | GGCGGAGGAGGAGAAGAAGGAGAAAGCTTATACTAACACAATG | |
| | | GCAGTCAGCAAAAATAAGAAAATGTCTAGTAATAGGTTATCTTGC | |
| | | TCTAGTACTATGTGGAAACGGGACATTCAGTAAAAACTATGCCTC | |
| | | GCACTCAGATGACTATGTACAGAAAGGACCCTTTGGAGGGGGAC | |
| | | TAAGCAGCATGAGATTTAACATGAGAATACTATATGATCAATTTAA | |
| | | AAGACACCTTAACTTCTGGACACACACAAACCAGGACCTAGACC | |
| | | TAGTTAGATACAGAGGCTGCACCATGACATTTTATAGACACCCAG | |
| | | AGGTGGACTTCATAGTAAAATTCAACAGAAAACCTCCATTCCTAG | |
| | | ACACAATAGTATCAGGTCCAGCCATGCACCCAGGCATGCTAATG | |
| | | ACAACAAAACACAAAATACTAGTAAAAAGCTTTAAAACAAAACCC | |
| | | AAAGGAAAAGGCACAGTAAAGGTGCGCATTCGCCCCCCCACACT | |
| | | CTTTGACGACCGTTGGTACTTTCAACATGACATCTGCAAAACCAC | |
| | | ACTGTTCACCATTAGCGCAACACCATGTGACCTGCGGTTTCCGTT | |
| | | CTGCTCACCACAAACTGACAACCCTTGCGTCAACTTCCTAGTTCT | |
| | | TGCAGGAGTGTATAACGGCAAACTTAGCATAGAAGCCACAAAGT | |
| | | TAGAATCACAATATAATTCACTAGTTTCATCTATAGAAATACCCAC | |
| | | CCAAGGCACTCTATTTAATACATTTAAAACACCAGAAATGATAAA | |
| | | GTGCCCCCCAGCAGTAAAAGCCTTAGAACATTCAGACGTAAACA | |
| | | GAAGCTGCTACAAAAAACTAGACAGCGCCTGGGGAGACACTATA | |
| | | TGGAACCAGAACACCATACAGAACTTTAAAGAAAACACAGACAA | |
| | | GTTGTGGGAAGCAAGAGGCAACCAAACAATGACTGGTAGCAAAT | |
| | | ACCTAAACTACAGAACAGGAATATACAGTGCCATATTCCTTTCAG | |
| | | CAGGCAGACTGTCACCAGACTTTGGGGGACTATACAATGACATA | |
| | | GTATACAATCCCACCACAGACGAAGGCATAGGAAACATTGTGTG | |
| | | GATAGACTGGTGTACAAAAGCAGACTGCAACTTCAATGAGACAC | |
| | | AGTCCAAAGGAGTAATAAAAGACATTCCACTGTGGGCAGCACTG | |
| | | TTTGGCTATGTAGACTTTCTAAAAAAGACATTTAAAGACGAACAG | |
| | | CTAGACAAAATTGCCAGACTCACTCTCATAAGCCCCTATACAAAG | |
| | | CCTCAACTAATAGGACCTACACAACCCAACAAAGGGTTTGTTCC | |
| | | GTACGACTACAACTTTGGCAGAGCACACATGCCCTCCGGAGAAT | |
| | | CCTACATACCTATGTACTACAGATTTAGATGGTACATCTGCCTATT | |
| | | TCACCAACAAAAGTTTATAGACGACATTGTAAGCAGCGGGCCCT | |
| | | TCGCATACCACGGCTCACAGCCCTCAGCAACTCTCACCACTAAA | |
| | | TACAAATTCCACTTTCTCTTTGGGGGCAACCCCGTTCCCCAACAG | |
| | | ACTGTCAGAGACTCTTGTAACCAACCAGTCTTTGACATTCCCGGA | |
| | | GCCGGTGGACTCCCTCGTCCGATACAAGTCGTTGACCCGAAATA | |
| | | CGTCAACGAAGGCTACACGTTCCACGCCTGGGACTTCCGTAGAG | |
| | | GGCTCTTTGGCCAAGCAGCTATTAAAAGAGTGTCGGGAGAACAA | |
| | | ACAAATGCTTCACTTTATTCATCAGGTCCAAAACGGCCAAGAACA | |
| | | GAAATTCCTCCACAAAATGCAGAAGAAGGCTCATATTCCAGGGA | |
| | | ACAAAAACTCCAGCCCTGGCTCGACTCGAGCGACCAGGAAGAG | |
| | | AGCGAGACAGAAGCCCCAGAAGAAGAAGCGACCTCGCCACCGT | |
| | | CGCTACAGCTCCAGCTCAAGCAGCAGATCAGGGAGCAGCGACA | |
| | | ACTCAGATGTGGAATCCAACACCTCTTCCAGCAACTAGTGAAAAC | |
| | | CCAGCAAAACTTGCATATCAATCCATGCCTACAGTAG | |
| CAF05775.1 | AJ620214.1 | ATGTACTTTTCCAGAAAAAGAAGACCCAAGAAGGAGAGGCCGCT | 112 |
| | | GCCACTGCGATACGTGTGTGGCCTACCGCCTAGCAGGCCTGAT | |
| | | CCGATGAGCTGGCGTCCACCTGCCCACGATGTCCCAGGACAAG | |
| | | AGGGCCTGTGGTACCGATCAGTTTTTACTTCTCATGGCGCTTTTT | |
| | | GTGGTTGCGGTGATTTTGTGGGTCATCTTCAGAGACTTAGCGAA | |
| | | CGCCTGGGTAGACCCCAACCACCAAGACCACCGGGCGGACCGC | |
| | | CGGGCCCTGCTGTGAGAGCTCTGCCTGCCCTGCCGCCTCCGGA | |
| | | GCCTGAACCAAGAAGACACGTCCAGAGAGAGAACCCGGGATGT | |
| | | GGTGGTGGAGACGCCGCAGATGGAGGGCCCCATGGAGAAGGA | |
| | | GGCGATGGAGACGACGCAGACCTCGGACCAGAAGATTTAGACG | |
| | | AGCTGCTCGACGTCCTAGACGCCCCAGAGTAA | |
| CAF05776.1 | AJ620214.1 | ATGTGGTGGTGGAGACGCCGCAGATGGAGGGCCCCATGGAGAA | 113 |
| | | GGAGGCGATGGAGACGACGCAGACCTCGGACCAGAAGATTTAG | |
| | | ACGAGCTGCTCGACGTCCTAGACGCCCCAGAGTAAGGAGACCT | |
| | | CGGCGCCGCAGGGGGTGGGCTCGTAGATATAGACTTAGAAGGA | |
| | | GGCGGAGGAGGAGAAGAAGGAGAAAGCTTATACTAACACAATG | |
| | | GCAGCCAGCAAAAATAAGAAAATGTCTAGTAATAGGTTATCTTGC | |
| | | TCTAGTACTATGTGGAAACGGGACATTCAGTAAAAACTATGCCTC | |
| | | GCACTCAGATGACTATGTACAGAAAGGACCCTTTGGAGGGGGAC | |
| | | TAAGCAGCATGAGATTTAACATGAGAATACTATATGATCAATTTAA | |
| | | AAGACACCTTAACTTCTGGACACACACAAACCAGGACCTAGACC | |
| | | TAGTTAGATACAGAGGCTGCACCATGACATTTTATAGACACCCAG | |
| | | AGGTGGACTTCATAGTAAAATTCAACAGAAAACCTCCATTCCTAG | |
| | | ACACAATAGTATCAGGTCCAGCCATGCACCCAGGCATGCTAATG | |
| | | ACAACAAAACACAAAATACTAGTAAAAAGCTTTAAAACAAAACCC | |
| | | AAAGGAAAAGGCACAGTAAAGGTACGCATTCGCCCCCCCCACAC | |
| | | TCTTTGA | |
| CAF05777.1 | AJ620214.1 | ATGATAAAGTGCCCCCCAGCAGTAAAAGCCTTAGAACATTCAGA | 114 |
| | | CGTAAACAGAAACTGCTACAAAAAACTAGACAGCGCCTGGGGAG | |
| | | ACACTATATGGAACCAGAACACCATACAGAACTTTAAAGAAAACA | |
| | | CAGACAAGTTGTGGGAAGCAAGAGGCAACCAAACAATGACTGGT | |
| | | AGCAAATACCTAAACTACAGAACAGGAATATACAGTGCCATATTC | |
| | | CTTTCAGCAGGCAGACTGTCACCAGACTTTGGGGGACTATACAA | |
| | | TGACATAGTATACAATCCCACCACAGGCGAAGGCATAGAAAACA | |
| | | TTGTGTGGATAGACTGGTGTACAAAAGCAGACTGCAACTTCAAT | |
| | | GAGACACAGTCCAAAGGAGTAATAAAAGACATTCCACTGTGGGC | |
| | | AGCACTGTTTGGCTATGTAGACTTTCTAAAAAAGACATTTAAAGA | |
| | | CGAACAGCTAGACAAAATTGCCAGACTCACTCTCATAAGCCCCT | |
| | | ATACAAAGCCTCAACTAATAGGACCTACACAACCCAACAAAGGG | |
| | | TTTGTTCCGTACGACTACAACTTTGGCAGAGCACACATGCCCTCC | |
| | | GGAGAATCCTACATACCTATGTACTACAGATTTAGATGGTACACC | |
| | | TGCCTATTTCACCAACAAAAGTCTATAGACGACATTGTAAGCAGC | |
| | | GGGCCCTTCGCATACCACGGCTCACAGCCCTCAGCAACTCTCAC | |
| | | CACTAAATACAAATTCCACTTTCTCTTTGGGGGCAACCCCGTTCC | |
| | | CCAACAGACTGTCAGAGACCCTTGTAACCAACCAATCTTTGACAT | |
| | | TCCCGGAGCCGGTGGACTCCCTCGTCCGATACAAGTCGTTGACC | |
| | | CGAAATACGTCAACGAAGGCTACACGTTCCACGCCTGGGACTTC | |
| | | CGTAGAGGGCTCTTTGGCCAAGCAGCTATTAAAAGAGTGTCGGG | |
| | | AGAACAAACAAATGCTTCACTTTATTCATCAGGTCCAAAACGGCC | |
| | | AAGAACAGAAATTCCTCCACAAAATGCAGAAGAAGGCTCATATTC | |
| | | CAGGGAACAAAAACTCCAGCCCTGGCTCGACTCGAGCGACCAG | |
| | | GAAGAAAGCGAGACAGAAGCCCCAGAAGAAGAAGCGACCTCGC | |
| | | CACCGTCGCTACAGCTCCAGCTCAAGCAGCAGATCAGGGAGCA | |
| | | GCGACAACTCAGATGTGGAATCCAACACCTCTTCCAGCAACTAG | |
| | | TGAAAACCCAGCAAAACTTGCATATCAACCCATGCCTACAATAG | |
| CAF05721.1 | AJ620215.1 | ATGTACTTTTCCAGAAAAAGAAGACCCAAGAAGGAGAGGCCGCT | 115 |
| | | GCCACTGCGATACGTGTGTGGCCTACCGCCTAGCAGGCCTGAT | |
| | | CCGATGAGCTGGCGTCCACCTGCCCACGATGTCCCAGGACAAG | |
| | | AGGGCCTGTGGTACCGATCAGTTTTTACTTCTCATGGCGCTTTTT | |
| | | GTGGTTGCGGTGATTTTGTGGGTCATCTTCAGAGACTTAGCGAA | |
| | | CGCCTGGGTAGACCCCAACCACCAAGACCACCGGGCGGACCGC | |
| | | CGGGCCCTGCTGTGAGAGCTCTGCCTGCCCTGCCGCCTCCGGA | |
| | | GCCTGAACCAAGAAGACACGTCCAGAGAGAGAACCCGGGATGT | |
| | | GGTGGTGGAGACGCCGCAGATGGAGGGCCCCATGGAGAAGAA | |
| | | GGCGATGGAGACGACGCAGACCTCGGGCCAGAAGATTTAGACG | |
| | | AGCTGCTCGACGTCCTAGACGCCCCAGAGTAA | |
| CAF05722.1 | AJ620215.1 | ATGTGGTGGTGGAGACGCCGCAGATGGAGGGCCCCATGGAGAA | 116 |
| | | GAAGGCGATGGAGACGACGCAGACCTCGGGCCAGAAGATTTAG | |
| | | ACGAGCTGCTCGACGTCCTAGACGCCCCAGAGTAAGGAGACCT | |
| | | CGGCGCCGCAGGGGGTGGGCTCGTAGATATAGACTTAGAAGGA | |
| | | GGCGGAGGAGGAGAAGAAGGAGAAAGCTTATACTAACACAATG | |
| | | GCAGCCAGCAAAAATAAGAAAATGTCTAGTAATAGGTTATCTCGC | |
| | | TCTAGTACTATGTGGAAACGGGACATTCAGTAAAAACTATGCCAC | |
| | | GCACTCAGATGACTATGTACAGAAAGGACCCTTTGGAGGGGGAC | |
| | | TAAGCAGCATGAGATTTAACATGAGAATACTATATGATCAATTTAA | |
| | | AAGACACCTTAACTTCTGGACACACACAAACCAGGACCTAGACC | |
| | | TAGTTAGATACAGAGGCTGCACCATGACATTTTATAGACACCCAG | |
| | | AGGTGGACTTCATAGTAAAATTCAACAGAAAACCTCCATTCCTAG | |
| | | ACACAATAGTATCAGGTCCAGCCATCCACCCAGGCATGCTAATG | |
| | | ACAACAAAACACAAAATACTAGTAAAAAGCTTTAAAACAAAACCC | |
| | | AAAGGAAAAGGCACAGTAAAGGTGCGCATTCGCCCCCCCACACT | |
| | | CTTTGACGACCGTTGGTACTTTCAACATGACATCTGCAAAACCAC | |
| | | ACTGTTCACCATTAGCGCAACACCATGTGACCTGCGGTTTCCGTT | |
| | | CTGCTCACCACAAACTGACAACCCTTGCGTCAACTTCCTAGTTCT | |
| | | TGCAGGAGTGTATAACGGCAAACTTAGCATAGAAGCCACAAAGT | |
| | | TAGAATCACAATATAATTCACTAGTTTCATCTATAGAAATACCCAC | |
| | | CCAAGGCACTCTATTTAATACATTTAAAACACCAGAAATGATAAA | |
| | | GTGCCCCCCAGCAGTAAAAGCCTTAGAACATTCAGACGTAAACA | |
| | | GAAACTGCTACAAAAAACTAGACAGCGCCTGGGGAGACACTATA | |
| | | TGGAACCAGAACACCATACAGAACTTTAAAGAAAACACAGACAA | |
| | | GTTGTGGGAAGCAAGAGGCAACCAAACAATGACTGGTAGCAAAT | |
| | | ACCTAAACTACAGAACAGGAATATACAGTGCCATATTCCTTTCAG | |
| | | CAGGCAGACTGTCACCAGACTTTGGGGGACTATACAATGACATA | |
| | | GTATACAATCCCACCACAGACGAAGGCATAGGAAACATTGTGTG | |
| | | GATAGACTGGTGTACAAAAGCAGACTGCAACTTCAATGAGACAC | |
| | | AGTCCAAAGGAGTAATAAAAGACATTCCACTGTGGGCAGCACTG | |
| | | TTTGGCTATGTAGACTTTCTAAAAAAGACATTTAAAGACGAACAG | |
| | | CTAGACAAAATTGCCAGACTCACTCTCATAAGCCCCTATACAAAG | |
| | | CCTCAACTAATAGGACCTACACAACCCAACAAAGGGTTTGTTCC | |
| | | GTACGACTACAACTTTGGCAGAGCACACATGCCCTCCGGAGAAT | |
| | | CCTACATACCTATGTACTACAGATTTAGATGGTACATCTGCCTATT | |
| | | TCACCAACAAAAGTTTATAGACGACATTGTAAGCAGCGGGCCCT | |
| | | TCGCATACCACGGCTCACAGCCCTCAGCAACTCTCACCACTAAA | |
| | | TACAAATTCCACTTTCTCTTTGGGGGCAACCCCGTTCCCCAACAG | |
| | | ACTGTCAGAGACCCTTGTAACCAACCAGTCTTTGACATTCCCGGA | |
| | | GCCGGTGGACTCCCCCGTCCGATACAAGTCGTTGACCCGAAATA | |
| | | CGTCAACGAAGGCTACACGTTCCACGCCTGGGACTTCCGTAGAG | |
| | | GGCTCTTTGGCCAAGCAGCTATTAAAAGAGTGTCGGGAGAACAA | |
| | | ACAAATGCTTCACTTTATTCATCAGGTCCAAAACGGCCAAGAACA | |
| | | GAAATTCCTCCACAAAATGCAGAAGAAGGCTCATATTCCAGGGA | |
| | | ACAAAAACTCCAGCCCTGGCTCGACTCGAGCGACCAGGAAGAG | |
| | | AGCGAGACAGAAGCCCCAGAAGAAGAAGCGACCTCGCCACCGT | |
| | | CGCTACAGCTCCAGCTCAAGCAGCAGATCAGGGAGCAGCGACA | |
| | | ACTCAGATGTGGAATCCAACACCTCTTCCAGCAACTAGTGAAAAC | |
| | | CCAGCAAAACTTGCATATCAATCCATGCCTACAGTAG | |
| CAF05723.1 | AJ620216.1 | ATGTACTTTTCCAGAAAAAGAAGACCCAAGAAGGAGAGGCCGCT | 117 |
| | | GCCACTGCGATACGTGTGTGGCCTACCGCCTAGCAGGCCTGAT | |
| | | CCGATGAGCTGGCGTCCACCTGCCCACGATGTCCCAGGACAAG | |
| | | AGGGCCTGTGGTACCGATCAGTTTTTACTTCTCATGGCGCTTTTT | |
| | | GTGGTTGCGGTGATTTTGTGGGTCATCTTCAGAGACTTAGCGAA | |
| | | CGCCTGGGTAGACCCCAACCACCAAGACCACCGGGCGAACCGC | |
| | | CGGGCCCTGCTGTGAGAGTTCTGCCTGCCCTGCCGCCTCCGGT | |
| | | ACCTGAACCAAGAAGACACGTCCAGAGAGAGAACCCGGGATGT | |
| | | GGTGGTGGAGACGCCGCAGATGGAGGGCCCCATGGAGAAGGA | |
| | | GGCGATGGAGACGACGCAGACCTCGGACCAGAAGATTTAGACG | |
| | | AGCTGCTCGACGTCCTAGACGCCCCAGAGTAA | |
| CAF05724.1 | AJ620216.1 | ATGTGGTGGTGGAGACGCCGCAGATGGAGGGCCCCATGGAGAA | 118 |
| | | GGAGGCGATGGAGACGACGCAGACCTCGGACCAGAAGATTTAG | |
| | | ACGAGCTGCTCGACGTCCTAGACGCCCCAGAGTAAGGAGACCT | |
| | | CGGCGCCGCAGGGGGTGGGCTCGTAGATATAGACTTAGAAGGA | |
| | | GGCGAAGGAGGAGAAGAAGGAGAAAGCTTATACTAACACAATGG | |
| | | CAGCCAGCAAAAATAAGAAAATGTCTAGTAATAGGTTATCTTGCT | |
| | | CTAGTACTATGTGGGAACGGGACATTCAGTAAAAACTATGCCTC | |
| | | CCACTCAGATGACTATGTACAGAAAGGACCCTTTGGAGGGGGAC | |
| | | TAAGCAGCATGAGATTTAACATGAGAATACTATATGATCAATTTAA | |
| | | AAGACACCTTAACTTCTGGACACACACGAACCAGGACCTAGACC | |
| | | TAGTTAGATACAGAGGCTGCACCATGACATTTTATAGACACCCAG | |
| | | AGGTGGACTTCATAGTAAAATTCAACAGAAAACCTCCATTCCTAG | |
| | | ACACAATAGTATCAGGTCCAGCCATGCACCCAGGCATGCTAATG | |
| | | ACAACAAAACACAAAATACTAGTAAAAAGCTTTAAAACAAAACCC | |
| | | AAAGGAAAAGGCACAGTAAAGGTGCGCATTCGCCCCCCCACACT | |
| | | CTTTGACGACCGTTGGTACTTTCAACATGACATCTGCAAAACCAC | |
| | | ACTGTTCACCATTAGCGCAACACCATGTGACCTGCGGTTTCCGTT | |
| | | CTGCTCACCACAAACTGACAACCCTTGCGTCAACTTCCTAGTTCT | |
| | | TGCAGGAGTGTATAACGGCAAACTTAGCATAGAACCCACAAACG | |
| | | TAGAATCACAATATAATTCACTACTTTCAGCTATAGAGACGAACA | |
| | | CCCAAGGCACTCTATTTAATACATTTAAAACACCAGAAATGATAA | |
| | | AGTGCCCCGCAGCAGGAAAAGCCCCAGAAACTGGAGACATATC | |
| | | CACAAACTGCTACAAAAAACTAGACAGCGCCTGGGGAGACACTA | |
| | | TATGGAACCAAAACACCATAGCCAACTTTAAAAAGAACACAGACA | |
| | | ACTTGTGGAATGCAGGACACAATCAAACAATGACTGGTAGCAAA | |
| | | TACCTAAACTACAGAACAGGAATATACAGTGCCATATTCCTTTCA | |
| | | GCAGGCAGACTGTCACCAGACTTTCCAGGACTATACGATGACAT | |
| | | AGTATACAATCCCACCACAGACGAAGGCATAGGAAACATTGTGT | |
| | | GGATAGACTGGTGTACAAAAGCAGACTGCAACTTCAATGAGACA | |
| | | CAGTCCAAAGGAGTAATAAAAGACATTCCACTGTGGGCAGCACT | |
| | | GTTTGGCTATGTAGACTTTCTAAAAAAGACATTTAAAGACGACCA | |
| | | GCTAGACAAAACTGCCAGACTCACTCTCATAAGCCCCTATACAAA | |
| | | GCCTCAACTAATAGGACCTACACAACCCAACAAAGGGTTTGTTC | |
| | | CGTACGACTACAACTTTGGCAGAGCACACATGCCCTCCGGAGAA | |
| | | TCCTACATACCTATGTACTACAGATTTAGATGGTACATCTGCCTAT | |
| | | TTCACCAACAAAAGTTTATAGACAACATTGTAAGCAGCGGGCCCT | |
| | | TCGCATACCACGGCTCACAGCCCTCAGCAACTCTCACCACTAAA | |
| | | TACAAATTCCACTTTCTCTTTGGGGGCAACCCCGTTCCCCAACAG | |
| | | ACTGTCAGAGACCCTTGTAACCAACCAGTCTTTGACATTCCCGGA | |
| | | GCCGGTGGACTCCCTCGTCCGATACAAGTCGTTGACCCGAAATA | |
| | | CGTCAACGAAGGCTACACGTTCCACGCCTGGGACTTCCGTAGAG | |
| | | GGCTCTTTGGCCAAGCAGCTATTAAAAGAGTGTCGGGAGAACAA | |
| | | ACAAATGCTTCACTTTATTCATCAGGCCCAAAACGGCCAAGAACA | |
| | | GAAATTCCTCCAGAAAATGCAGAAGAAGGCTCATATTCCAGGGA | |
| | | ACAAAAACTCCAGCCCTGGCTCGACTCGAGCGACCAGGAAGGG | |
| | | AGCGAGACAGAAGCCCCAGAAGAAGAAGCGACCTCGCCGCCGT | |
| | | CGCTACAGCTCCAGCTCAAGCAGCAGATCAGGGAGCAGCGACA | |
| | | ACTCAGATGTGGAATCCAACACCTCTTCCAGCAACTAGTGAAAAC | |
| | | CCAGCAAAACTTGCATATCAACCCATGCCTACAATAG | |
| CAF05725.1 | AJ620217.1 | ATGTACTTTTCCAGAAAAAGAAGACCCAAGAAGGAGAGGCCGCT | 119 |
| | | GCCACTGCGATACGTGTGTGGCCTACCGCCTAGCAGGCCTGAT | |
| | | CCGATGAGCTGGCGTCCACCTGCCCACGATGTCCCAGGACAAG | |
| | | AGGGCCTGTGGTACCGATCAGTTTTTACTTCTCATGGCGCTTTTT | |
| | | GTGGTTGCGGTGATTTTGTGGGTCATCTTCAGAGACTTAGCGAA | |
| | | CGCCTGGGTAGACCCCAACCACCAAGACCACCGGGCGGACCGC | |
| | | CGGGCCCTGCTGTGAGAGCTCTGCCTGCCCTGCCGCCTCCGGA | |
| | | GCCTGAACCAAGAAGACACGTCCAGAGAGAGAACCCGGGATGT | |
| | | GGTGGTGGAGACGCCGCAGATGGAGGGCCCCATGGAGAAGGA | |
| | | GGCGATGGAGACGACGCAGACCTCGGACCAGAAGATTTAGACG | |
| | | AGCTGCTCGACGTCCTAGACGCCCCAGAGTAA | |
| CAF05726.1 | AJ620217.1 | ATGTGGTGGTGGAGACGCCGCAGATGGAGGGCCCCATGGAGAA | 120 |
| | | GGAGGCGATGGAGACGACGCAGACCTCGGACCAGAAGATTTAG | |
| | | ACGAGCTGCTCGACGTCCTAGACGCCCCAGAGTAAGGAGACCT | |
| | | CGGCGCCGCAGGGGGTGGGCTCGTAGATATAGACTTAGAAGGA | |
| | | GGCGGAGGAGGAGAAGAAGGAGAAAGCTTATACTAACACAATG | |
| | | GCAGCCAGCAAAAATAAGAAAATGTCTAGTAATAGGTTATCTTGC | |
| | | TCTAGTACTATGTGGAAACGGGACATTCAGTAAAAACTATGCCTC | |
| | | GCACTCAGATGACTATGTACAGAAAGGACCCTTTGGAGGGGGAC | |
| | | TAAGCAGCATGAGATTTAACATGAGAGTACTATATGATCAATTTA | |
| | | AAAGACACCTTAACTTCTGGACACACACAAACCAGGACCTAGAC | |
| | | CTAGTTAGATACAGAGGCTGCACCATGACATTTTATAGACACCCA | |
| | | GAGGTGGACTTCATAGTAAAATTCAACAGAAAACCTCCATTCCTA | |
| | | GACACAATAGTATCAGGTCCAGCCATGCACCCAGGCATGCTAAT | |
| | | GACAACAAAACACAAAATACTAGTAAAAAGCTTTAAAACAAAACC | |
| | | CAAAGGAAAAGGCACAGTAAAGGTGCGCATTCGCCCCCCCACA | |
| | | CTCTTTGACGGCCGTTGGTACTTTCAACATGACATCTACAAAACC | |
| | | ACACTGTTCACCATTAGCGCAACACCGTGTGACCTGCGGTTTCC | |
| | | GTTCTGCTCACCACAAACTGACAACCCTTGCGTCAACCTCCTAGT | |
| | | TCTTGCAGGAGTGTATAACGGCAAACTTAGCATAGAAGCCACAA | |
| | | AGTTAGAATCACAATATAATTCACTAGTTTCATCTATAGAAATACC | |
| | | CACCCAAGGCACTCTATTTAATACATTTAAAACACCAGAAATGAT | |
| | | AAAGTGCCCCCCAGCAGTAAAAGCCTCAGAACATTCAGACGTAA | |
| | | ACAGAAACTGCTACAAAAAACTAGACAGCGCCTGGGGAGACACT | |
| | | ATATGGAACCCGAGCACCATACAGAACTTTAAAGAAAACACAGA | |
| | | GAAGTTGTGGGAAGCAAGAGGCAACCAAACAATGACTGGTAGCA | |
| | | AATACCTAAACTACAGAACAGGAATATACAGTGCCATATTCCTTT | |
| | | CAGCAGGCAGACTGTCACCAGACTTTGGGGGACTATACAATGAC | |
| | | ATAGTATACAATCCCACCACAGACGAAGGCATAGGAAACATTGT | |
| | | GTGGATAGACTGGTGTACAAAAGCAGACTGCAACTTCAATGAGA | |
| | | CACAGTCCAAAGGGGTAATAAAAGACATTCCACCGTGGGCAGCA | |
| | | CTGTTTGGCTATGTAGACTTTCTAAAAAAGACATTTAAAGACGAA | |
| | | CAGCTAGACAAAATTGCCAGACTCACTCTCATAAGCCCCTATACA | |
| | | AAGCCTCAACTAATAGGACCTACACAACCCAACAAAGGGTTTGTT | |
| | | CCGTACGACTACAACTTTGGCAGAGCACACATGCCCTCCGGAGA | |
| | | ATCCTACATACCTATGTACTACAGATTTAGATGGTACATCTGCCT | |
| | | ATTTCACCAACAAAAGTTTATAGACGACATTGTAAGCAGCGGGCC | |
| | | CTTCGCATACCACGGCTCACAGCCCTCAGCAACTCTCACCACTA | |
| | | AATACAAATTCCACTTTCTCTTTGGGGGCAACCCCGTTCCCCAAC | |
| | | AGACTGTCAGAGACCCTTGTAACCAACCAGTCTTTGACATTCCCG | |
| | | GAGCCGGTGGACTCCCTCGTCCGATACAAGTCGTTGACCCGAAA | |
| | | TACGTCAACGAAGGCTACACGTTCCACGCCTGGGACTTCCGTAG | |
| | | AGGGCTCTTTGGCCAAGCAGCTATTAAAAGAGTGTCGGGAGAAC | |
| | | AAACAAATGCTTCACTTTATTCATCAGGTCCAAAACGGCCAAGAA | |
| | | CAGAAATTCCTCCACAAAATGCAGAAGAAGGCTCATATTCCAGG | |
| | | GAACAAAAACTCCAGCCCTGGCTCGACTCGAGCGACCAGGAAG | |
| | | AGAGCGAGACAGAAGCCCCAGAAGAAGAAGCGACCTCGCCACC | |
| | | GTCGCTACAGCTCCAGCTCAAGCAGCAGATCAGGGAGCAGCGA | |
| | | CAACTCAGATGTGGAATCCAACACCTCTTCCAGCAACTAGTGAAA | |
| | | ACCCAGCAAAACTTGCATATCAACCCATGCCTACAATAG | |
| CAF05727.1 | AJ620218.1 | ATGCGTTTTCGCAGGGTTGCCCAGAAAAGGAAAGTGCTTTTGCA | 121 |
| | | AACTGTGCCAGCTGCAAAGAAGGCTAGGCGGCTTCTAGGTATGT | |
| | | GGCAGCCCCCCACGCACAATGTCCCGGGCATCGAGAGAAACTG | |
| | | GTACGAGAGCTGTTTTAGATCCCACGCTGCTGTTTGTGGCTGTG | |
| | | GCGATTTTGTTGGCCATCTTAATCATCTGGCAACTACTCTGGGTC | |
| | | GTCCTCCGCGTCCTGGGCCCCCAGGCGGACCCCGCACGCCGC | |
| | | AAATAAGAAACCTGCCAGCGCTCCCGGCGCCCCAGGGCGAGCC | |
| | | CGGTGACAGAGCGTCATGGCGTGGGGCTTCTGGGGCCGACGCC | |
| | | GCCGGTGGAGACGATGGAGAGCGCGGCGCAGACGGTGGAGAC | |
| | | CCCGCAGACGTAGGAGACGACGCCCTCCTCGCCGCTTTCGAGC | |
| | | TCGTCGAAGAGTAA | |
| CAF05728.1 | AJ620218.1 | ATGGCGTGGGGCTTCTGGGGCCGACGCCGCCGGTGGAGACGA | 122 |
| | | TGGAGAGCGCGGCGCAGACGGTGGAGACCCCGCAGACGTAGG | |
| | | AGACGACGCCCTCCTCGCCGCTTTCGAGCTCGTCGAAGAGTAAG | |
| | | GAGGCGCGGGGGGAGGTGGCGCAGACGCTACAGAAAATGGCG | |
| | | ACGGGGCAGACGCAGACGGACTCACAGAAAAAAGATAGTCATAA | |
| | | AACAGTGGCAACCTAACTTTATAAGACGCTGCTACATCATAGGGT | |
| | | ACTTACCACTTATATTCTGCGGCGAAAATACAACCGCCCAGAACT | |
| | | TTGCCACTCACTCGGACGACATGATAAGCAAAGGACCGTACGGG | |
| | | GGGGGCATGACTACCACCAAATTCACTCTGAGAATACTGTACGA | |
| | | CGAGTTTACCAGGTTTATGAACTTTTGGACTGTCAGTAACGAAGA | |
| | | CCTAGACCTGTGTAGATACGTGGGCTGCAAACTAATATTTTTTAA | |
| | | ACACCCCACGGTGGACTTTATAGTACAGATAAACACTCAGCCTC | |
| | | CTTTCTTAGACACGCACCTCACCGCGGCCAGCATACACCCGGGC | |
| | | ATCATGATGCTCAGCAAGAGACACATACTAATACCCTCTCTAAAG | |
| | | ACCCGGCCCAGCAGAAAACACAGGGTGGTCGTCAGGGTGGGCG | |
| | | CCCCAAGACTTTTTCAGGACAAGTGGTACCCCCAGTCAGACCTG | |
| | | TGTGACACAGTTCTGCTTTCCATATTCGCAACCGCCTGCGACTTG | |
| | | CAATATCCGTTCGGCTCACCACTAACTGACAACCCTTGCGTCAAC | |
| | | TTCCAGATCCTGGGGCCCCAGTACAAAAAACACCTTAGTATTAG | |
| | | CTCCACTATGGATGACACTAACAAAGCACATTATGAAGAAAACTT | |
| | | ATTTAAGAAAATTGAACTATACAACACCTTTCAAACCATAGCTCAG | |
| | | CTTAAAGAGACAGGAACAATTTCAGGCATGCAACCTTCTTGGACT | |
| | | GAAGTCCAGAATTCAAAAACACTTAATGAAACAGGTAGCAATGCC | |
| | | ACTGAGAGTAGAGACACTTGGTATAAAGGAAATACATACAACGA | |
| | | CAAGATACACCAGTTAGCAGAAAAAACCAGAAAGAGATTTAAAAA | |
| | | TGCAACAAAAGCAGCACTACCAAACTACCCCACAATAATGTCCG | |
| | | CAGACTTATATGAATACCACTCAGGCATATACTCCAGCATATATC | |
| | | TATCAGCTGGCAGGAGCTACTTTGAAACCACCGGGGCCTACTCT | |
| | | GACATTATATACAACCCTTTCACAGACAAGGGCACAGGCAACATA | |
| | | ATCTGGATAGACTACCTCACAAAAGAAGACACCATTTTTGTAAAA | |
| | | AACAAAAGCAAATGCGAGATAATGGACATGCCCCTGTGGGCGGC | |
| | | CTGCACAGGATACACAGAGTTTTGTGCAAAGTATACAGGCGACT | |
| | | CTGCCATTATTTACAATGCAAGAATAGTCATAAGATGCCCATACA | |
| | | CTGAGCCCATGTTAATAGACCACTCAGACCCAAACAAAGGCTTC | |
| | | GTTCCCTACTCATTTAGCTTTGGCAACGGAAAGATGCCCGGAGG | |
| | | CAGCTCCAACGTGCCCATAAGAATGAGAGCCAAGTGGTACGTGA | |
| | | ACATATTCCACCAAAAAGAAGTATTGGAGAGCATAGTACAGTCCG | |
| | | GACCGTTTGGGTACAAGGGCGACATAAAATCAGCTGTACTAGCC | |
| | | ATGAAATACAGATTTCACTGGAAGTGGGGCGGAAACCCTATATC | |
| | | CAAACAGGTCGTCAGGAATCCCTGCTCCAACTCCAGCTCATCCG | |
| | | CGGCCCATAGAGGACCTCGCAGCGTACAAGCGGTTGACCCGAA | |
| | | ATACAATACCCCAGAGGTCACGTGGCACTCGTGGGACATTAGAC | |
| | | GAGGACTCTTTGGCAAAGCAGGTATTAAAAGAATGCAACAGGAA | |
| | | TCAGATGCTCTTTACATTCCTCCAGGACCAATCAAGAGACCTCGC | |
| | | AGGGACACCAACGCCCAAGACCCAGAAGAGCAAAACGAAAGCT | |
| | | CAGGTTTCAGAGTCCAGCAGCGACTCCCGTGGGTCCACTCCAG | |
| | | CCAAGAGACGCAAAGCTCCCAAGAAGAGACGGAGGCGCAGGGG | |
| | | TCGGTACAAGACCAACTACTCCTCCAGCTCCGAGAGCAGCGAGT | |
| | | TCTCCGACTCCAGCTCCAGCAACTCGCAACCCAAGTCCTCAAAG | |
| | | TCCAAGCAGGGCACAGCCTACACCCCCTATTATCTTCCCAAGCA | |
| | | TAA | |
| CAF05729.1 | AJ620219.1 | ATGCGTTTTCGCAGGGTTGCCCAGAAAAGGAAAGTGCTTTTGCA | 123 |
| | | AACTGTGCCAGCTGCAAAGAAGGCTAGGCGGCTTCTAGGTATGT | |
| | | GGCAGCCCCCCACGCATAATGTCCCGGGCATCGAGAGAAACTG | |
| | | GTACGAGAGCTGTTTTAGATCCCACGCTGCTGTTTGTGGCTGTG | |
| | | GCGATTTTGTTGGCCATCTTAATCATCTGGCAACTACTCTGGGTC | |
| | | GTCCTCCGCGTCCTGGGCCCCCAGGCGGACCCCGCACGCCGC | |
| | | AAATAAGAAACCTGCCAGCGCTCCCGGCGCCCCAGGGCGAGCC | |
| | | CGGTGACAGAGCGTCATGGCGTGGGGCTTCTGGGGCCGACGCC | |
| | | GCCGGTGGAGACGATGGAGAGCGCGGCGCAGACGGTGGAGAC | |
| | | CCCGCAGACGTAGGAGACGACGCCCTCCTCGCCGCTTTCGAGC | |
| | | TCGTCGAAGAGTAA | |
| CAF05730.1 | AJ620219.1 | ATGGCGTGGGGCTTCTGGGGCCGACGCCGCCGGTGGAGACGA | 124 |
| | | TGGAGAGCGCGGCGCAGACGGTGGAGACCCCGCAGACGTAGG | |
| | | AGACGACGCCCTCCTCGCCGCTTTCGAGCTCGTCGAAGAGTAAG | |
| | | GAGGCGCGGGGGGAGGTGGCGCAGACGCTACAGAAAATGGCG | |
| | | ACGGGGCAGACGCAGACGGACTCACAGAAAAAAGATAGTCATAA | |
| | | AACAGTGGCAACCTAACTTTATAAGACGCTGCTACATCATAGGGT | |
| | | ACTTACCACTTATATTCTGCGGCGAAAATACAACCGCCCAGAACT | |
| | | TTGCCACTCACTCGGACGACATGATAAGCAAAGGACCGTACGGG | |
| | | GGGGGCATGACTACCACCAAATTCACTCTGAGAATACTGTACGA | |
| | | CGAGTTTACCAGGTTTATGAACTTTTGGACTATCAGTAACGAAGA | |
| | | CCTAGACCTGTGTAGATACGTGGGCTGCAAACTAATATTTTTTAA | |
| | | ACACCCCACGGTGGACTTTATAGTACAGATAAACACTCAGCCTC | |
| | | CTTTCTTAGACACGCACCTCACCGCGGCCAGCATACACCCGGGC | |
| | | ATCATGATGCTCAGCAAGAGACACATACTAATACCCTCTCTAAAG | |
| | | ACCCGGCCCAGCAGAAAACACAGGGTGGTCGTCAGGGTGGGCG | |
| | | CCCCAAGACTTTTTCAGGACAAGTGGTACCCCCAGTCAGACCTG | |
| | | TGTGACACAGTTCTGCTTTCCATATTCGCAACCGCCTGCGACTTG | |
| | | CAATATCCGTTTGGCTCACCACTAACTGACAACCCTTGCGTCAAC | |
| | | TTCCAGATCCTGGGGCCCCAGTACAAAAAACACCTTAGTATTAG | |
| | | CTCCACTATGGATGAAAGTAACATATCACATTATAAAGAAAACTTA | |
| | | TTTAAGAAAACTGAACTATACAACACCTTTCAAACCATAGCTCAG | |
| | | CTTAAAGAGACAGGAAACATTTCAGGCATTAGTCCTAATTGGACT | |
| | | GAAGTCCAGAATTCAACAACACTTAATCAAACAGGTGACAATGCC | |
| | | ACTAACAGTAGAGACACTTGGTATAAAGGAAATACATACAACCAC | |
| | | AAGATATGCGACTTAGCAGAAAAAACCAGAAACAGATTTAAAAAT | |
| | | GCAACCAAAGCAGCACTACCAAACTACCCCACAATAATGTCCAC | |
| | | AGACCTATATGAATACCACTCAGGCATATACTCCAGCATATATTT | |
| | | ATCAGCTGGCAGGAGCTACTTTGAAACCACCGGGGCCTACTCTG | |
| | | ACATTATATACAACCCTTTCACAGACAAAGGCACAGGCAACATAA | |
| | | TCTGGATAGACTACCTCACAAAAGAAGACACCATTTTTGTAAAAA | |
| | | ACAAAAGCAAATGCGAGATAATGGACATGCCCCTGTGGGCGGC | |
| | | CTGCACAGGATACACAGAGTTTTGTGCAAAGTATACAGGCGACT | |
| | | CTGCCATTATCTACAATGCAAGAATACTCATAAGATGCCCATACA | |
| | | CTGAGCCCATGTTAATAGACCACTCAGACCCAAACAAAGGCTTC | |
| | | GTTCCCTACTCATTTAACTTTGGCAACGGAAAGATGCCCGGAGG | |
| | | CAGCTCCAACGTACCCATAAGAATGAGAGCCAAATGGTACGCGA | |
| | | ACATATTCCACCAAAAGGAGGTTCTAGAGGCTATAGTACAAAGC | |
| | | GGACCGTTCGGGTACAAGGGCGACATAAAATCAGCTGTACTAGC | |
| | | CATGAAATACAGATTTCACTGGAAGTGGGGCGGAAACCCTATAT | |
| | | CCAAACAGGTCGTCAGGAATCCCTGCTCCAACTCCAGCTCATCC | |
| | | GCGGCCCATAGAGGACCTCGCAGCGTACAAGCGGTTGACCCGA | |
| | | AATACAATACCCCAGAGGTCACGTGGCACTCGTGGGACATTAGA | |
| | | CGAGGACTCTTTGGCAAAGCAGGTATTAAAAGAATGCAACAGGA | |
| | | ATCAGATGCTCTTTACATTCCTCCAGGACCAATCAAGAGACCTCG | |
| | | CAGGGACACCAACGCCCAAGACCCAGAAGAGCAAAACGAAAGC | |
| | | TCAGGTTTCAGAGTCCAGCAGCGACTCCCGTGGGTCCACTCCAG | |
| | | CCAAGAGACGCAAAGCTCCCAAGAAGAGACGGAGGCGCAGGGG | |
| | | TCGGTACAAGACCAACTACTCCTCCAGCTCCGAGAGCAGCGAGT | |
| | | TCTCCGACTCCAGCTCCAGCAACTCGCAGCCCAAGTCCCCAAAG | |
| | | TCCAAGCAGGGCACAGCCTACACCCCCTATTATCTTCCCAAGCA | |
| | | TAA | |
| CAF05731.1 | AJ620220.1 | ATGCGTTTTCGCAGGGTTGCCCAGAAAAGGAAAGTGCTTTTGCA | 125 |
| | | AACTGTGCCAGCTGCAAAGAAGGCTAGGCGGCTTCTAGGTATGT | |
| | | GGCAGCCCCCCACGCACAATGTCCCGGGCATCGAGAGAAACTG | |
| | | GTACGAGAGCTGTTTTAGATCCCACGCTGCTGTTTGTGGCTGTG | |
| | | GCGATTTTGTTGGCCATCTTAATCATCTGGCAACTACTCTGGGTC | |
| | | GTCCTCCGCGTCCTGGGCCCCCAGGCGGACCCCGCACGCCGC | |
| | | AAATAAGAAACCTGCCAGCGCTCCCGGCGCCCCAGGGCGAGCC | |
| | | CGGTGACAGAGCGTCATGGCGTGGGGCTTCTGGGGCCGACGCC | |
| | | GCCGGTGGAGACGATGGAGAGCGCGGCGCAGACGGTGGAGAC | |
| | | CCCGCAGACGTAGGAGACGACGCCCTCCTCGCCGCTTTCGAGC | |
| | | TCGTCGAAGAGTAA | |
| CAF05732.1 | AJ620220.1 | ATGGCGTGGGGCTTCTGGGGCCGACGCCGCCGGTGGAGACGA | 126 |
| | | TGGAGAGCGCGGCGCAGACGGTGGAGACCCCGCAGACGTAGG | |
| | | AGACGACGCCCTCCTCGCCGCTTTCGAGCTCGTCGAAGAGTAAG | |
| | | GAGGCGCGGGGGGAGGTGGCGCAGACGCTACAGAAAATGGCG | |
| | | ACGGGGCAGACGCAGACGGACTCACAGAAAAAAGATAGTCATAA | |
| | | AACAGTGGCAACCAAACTTTATAAGACGCTGCTACATCATAGGGT | |
| | | ACTTACCACTTATATTCTGCGGCGAAAATACAACCGCCCAGAACT | |
| | | TTGCCACTCACTCGGACGACATGATAAGCAAAGGACCGTACGGG | |
| | | GGGGGCATGACTACCACCAAATTCACTCTGAGAATACTGTACGA | |
| | | CGAGTTTACCAGGTTTATGAACTTTTGGACTGTCAGTAACGAAGA | |
| | | CCTAGACCTGTGTAGATACGTGGGCTGCAAACTAATATTTTTTAA | |
| | | ACACCCCACGGTGGACTTTATAGTACAGATAAACACTCAGCCTC | |
| | | CTTTCTTAGACACGCACCTCACCGCGGCCAGCATACACCCGGGC | |
| | | ATCATGATGCTCAGCAAGAGACACATACTAATACCCTCTCTAAAG | |
| | | ACCCGGCCCAGCAGAAAACACAGGGTGGTCGTCAGGGTGGGCG | |
| | | CCCCAAGACTTTTTCAGGACAAGTGGTACCCCCAGTCAGACCTG | |
| | | TGTGACACAGTTCTGCTTTCCATATTCGCAACCGCCTGCGACTTG | |
| | | CAATATCCGTTCGGCTCACCACTAACTGACAACCCTTGCGTCAAC | |
| | | TTCCAGATCCTGGGGCCCCAGTACAAAAAACACCTTAGTATTAG | |
| | | CTCCACTATGGATGACACTAACAAAGCACATTATGAAGAAAACTT | |
| | | ATTTAATAAAACTGAACTATACAACACCTTTCAAACCATAGCTCAG | |
| | | CTTAGAGACACAGGACAAACTACAAACGCTAGTCCTAATTGGAAT | |
| | | CAGGTCCAGAATACAGCAGCACTTGAGTTATCAGGTGCAAATGC | |
| | | CACTAGCAGCAAAGACACTTGGTATAAAGGTAATACATACACGAA | |
| | | AGACATATCAAAGTTAGCAGAAAAAACCAGACAAAGATTTAAAGC | |
| | | TGCAACAATAGCAGCACTACCAAACTACCCCACAATAATGTCCAC | |
| | | AGACCTATATGAATACCACTCAGGCATATACTCCAGCATATATTT | |
| | | ATCAGCTGGCAGGAGCTACTTTGAAACCACCGGGGCCTACTCTG | |
| | | ACATTATATACAACCCTTTCACAGACAAAGGCACAGGCAACATAA | |
| | | TCTGGATAGACTACCTCACAAAAGAAGACACCATTTTTGTAAAAA | |
| | | ACAAAAGCAAATGCGAGATAATGGACATGCCCCTGTGGGCGGC | |
| | | CTGCACAGGATACACAGAGTTTTGTGCAAAGTATACAGGCGACT | |
| | | CTGCCATTATCTACAATGCAAGAATACTCATAAGATGCCCACACA | |
| | | CTGAGCCCATGTTAATAGACCACTCAGACCCAAACAAAGGCTTC | |
| | | GTTCCCTACTCATTCGACTTTGGCAATGGAAAGATGCCCGGAGG | |
| | | CAGCTCCAACGTACCGATAAGAATGAGGGCCAAATGGTACGTGA | |
| | | ACATATTCCACCAAAAGGAGGTTCTAGAGGCTATAGTACAAAGC | |
| | | GGACCGTTCGGGTACAAGGGCGACATAAAATCAGCTGTACTAGC | |
| | | CATGAAATACAGATTTCACTGGAAGTGGGGCGGAAACCCTATAT | |
| | | CCAAACAGGTCGTCAGGAATCCCTGCTCCAACTCCAGCTCATCC | |
| | | GCGGCCCATAGAGGACCTCGCAGCGTACAAGCGGTTGACCCGA | |
| | | AATACAATACCCCAGAGGTCACGTGGCACTCGTGGGACATTAGA | |
| | | CGAGGACTCTTTGGCAAAGCAGGTATTAAAAGAATGCAACAGGA | |
| | | ATCAGATGCTCTTTACATTCCTCCAGGACCAATCAAGAGACCTCG | |
| | | CAGGGACACCAACGCCCAAGACCCAGAAGAGCAAAACGAAAGC | |
| | | TCAGGTTTCAGAGTCCAGCAGCGACTCCCGTGGGTCCACTCCAG | |
| | | CCAAGAGACGCAAAGCTCCCAAGAAGAGACGGAGGCGCAGGGG | |
| | | TCGGTACAAGACCAACTACTCCTCCAGCTCCGAGAGCAGCGAGT | |
| | | TCTCCGACTCCAGCTCCAGCAACTCGCAACCCAAGTCCTCAAAG | |
| | | TCCAAGCAGGGCACAGCCTACACCCCCTATTATCTTCCCAAGCA | |
| | | TAA | |
| CAF05733.1 | AJ620221.1 | ATGCGTTTTCGCAGGGTTGCCCAGAAAAGGAAAGTGCTTTTGCA | 127 |
| | | AACTGTGCCAGCTGCAAAGAAGGCTAGGCGGCTTCTAGGTATGT | |
| | | GGCAGCCCCCCACGCACAATGTCCCGGGCATCGAGAGAAACTG | |
| | | GTACGAGAGCTGTTTTAGATCCCACGCTGCTGTTTGTGGCTGTG | |
| | | GCGATTTTGTTGGCCATCTTAATCATCTGGCAACTACTCTGGGTC | |
| | | GTCCTCCGTGTCCTGGGCCCCCAGGCGGACCCCGCACGCCGCA | |
| | | AATAAGAAACCTGCCAGCGCTCCCGGCGCCCCAGGGCGAGCCC | |
| | | GGTGACAGAGCGCCATGGCGTGGGGCTTCTGGGGCCGACGCC | |
| | | GCCGGTGGAGACGATGGAGAGCGCGGCGCAGACGGTGGAGAC | |
| | | CCCGCAGACGTAGGAGACGACGCCCTACTCGCCGCTTTCGAGC | |
| | | TCGTCGAAGAGTAA | |
| CAF05734.1 | AJ620221.1 | ATGGCGTGGGGCTTCTGGGGCCGACGCCGCCGGTGGAGACGA | 128 |
| | | TGGAGAGCGCGGCGCAGACGGTGGAGACCCCGCAGACGTAGG | |
| | | AGACGACGCCCTACTCGCCGCTTTCGAGCTCGTCGAAGAGTAAG | |
| | | GAGGCGCGGGGGGAGGTGGCGCAGACGCTACAGAAAATGGCG | |
| | | ACGGGGCAGACGCAGACGGACTCATAGAAAAAAGATAGTCATAA | |
| | | AACAGTGGCAACCAAACTTTATAAGACGCTGCTACATCATAGGGT | |
| | | ACTTACCACTTATATTCTGCGGCGAAAATACAACCGCCCAGAACT | |
| | | TTGCCACTCGCTCGGACGACATGATAAGCAAAGGACCGTACGG | |
| | | GGGGGGCATGACTACCACCAAATTCACTCTGAGAATACTGTACG | |
| | | ACGAGTTTACCAGGTTTATGAACTTTTGGACTGTCAGTAACGAAG | |
| | | ACCTAGACCTGTGTAGATACGTGGGCTGCAAACTAATATTTTTTA | |
| | | AACACCCCACGGTGGACTTTATAGTACAGATAAACACTCAGCCT | |
| | | CCTTTCTTAGACACGCACCTCACCGCGGCCAGCATACACCCGGG | |
| | | CATCATGATGCTCAGCAAGAGACACATACTAATACCCTCTCTAAA | |
| | | GACCCGGCCCAGCAGAAAACACAGGGTGGTCGTCAGGGTGGGC | |
| | | GCCCCAAGACTTTTTCAGGACAAGTGGTACCCCCAGTCAGACCT | |
| | | GTGTGACACAGTTCTGCTTTCCATATTCGCAACCGCCTGCGACTT | |
| | | GCAATATCCGTTCGGCTCACCACTAACTGACAACCCTTGCGTCA | |
| | | ACTTCCAGATCCTGGGGCCCCAGTACAAAAAACACCTTAGTATTA | |
| | | GCTCCACTATGGATGAAAGTAACAAAGCACATTATGAACAAAACT | |
| | | TATTTAAGAAAACTGAACTATACAACACCTTTCAAACCATAGCTCA | |
| | | GCTTAAAGAGACAGGAAACATTTCAGGCATTACTCCTACTTGGAC | |
| | | TGAAGTCCAGAATTCAACAACACTTAATCAAGCAGGTAACAATGC | |
| | | CACTGACAGTAGAGACACTTGGTATAAAGGAAATACATACAACGA | |
| | | GAAGATATCCGAGTTAGCACAAATAACCAGAAACAGATTTAAAAA | |
| | | TGCAACCAAAACAGCACTACCAAACTACCCCACAATAATGTCCAC | |
| | | AGACCTATATGAATACCACTCAGGCATATACTCCAGCATATATTT | |
| | | ATCAGCTGGCAGGAGCTACTTTGAAACCACCGGGGCCTACTCTG | |
| | | ACATTATATACAACCCTTTCACAGACAAAGGCACAGGCAACATAA | |
| | | TCTGGATAGACTACCTCACAAAAGAAGACACCATTTTTGTAAAAA | |
| | | ACAAAAGCAAATGCGAGATAATGGACATGCCCCTGTGGGCGGC | |
| | | CTGCACAGGATACACAGAGTTTTGTGCAAAGTATACAGGCGACT | |
| | | CTGCCATTATTTACAATGCAAGAATAGTCATAAGATGCCCATACA | |
| | | CTGAGCCCATGTTAATAGACCACTCAGACCCAAACAAAGGCTTC | |
| | | GTCCCCTACTCATTTAACTTTGGCAACGGAAAGATGCCCGGAGG | |
| | | CAGCTCCAACGTGCCCATAAGAATGAGAGCCAAGTGGTACGTGA | |
| | | ACATATTCCACCAAAAAGAAGTATTGGAGAGCATAGTACAGTCCG | |
| | | GACCGTTTGGGTACAAGGGCGACATAAAATCAGCTGTACTAGCC | |
| | | ATGAAATACAGATTTCACTGGAAGTGGGGCGGAAACCCTATATC | |
| | | CAAACAGGTCGTCAGGAATCCCTGCTCCAACTCCAGCTCATCCG | |
| | | CGGCCCATAGAGGACCTCGCAGCGTACAAGCGGTTGACCCGAA | |
| | | ATACAATACCCCAGAGGTCACGTGGCACTCGTGGGACATTAGAC | |
| | | GAGGACTCTTTGGCAAAGCAGGTATTAAAAGAATGCAACAGGAA | |
| | | TCAGATGCTCTTTACATTCCTCCAGGACCAATCAAGAGACCTCGC | |
| | | AGGGACACCAACGCCCAAGACCCAGAAGAGCAAAACGAAAGCT | |
| | | CAGGTTTCAGAGTCCAGCAGCGACTCCCGTGGGTCCACTCCAG | |
| | | CCAAGAGACGCAAAGCTCCCAAGAAGAGACGGAGGCGCAGGGG | |
| | | TCGGTACAAGACCAACTACTCCTCCAGCTCCGAGAGCAGCGAGT | |
| | | TCTCCGACTCCAGCTCCAGCAACTCGCAACCCAAGTCCTCAAAG | |
| | | TCCAAGCAGGGCACAGCCTACACCCCCTATTATCTTCCCAAGCA | |
| | | TAA | |
| CAF05735.1 | AJ620222.1 | ATGCGTTTTCGCAGGGTTGCCCAGAAAAGGAAAGTGCTTTTGCA | 129 |
| | | AACTGTGCCAGCTGCAAAGAAGGCTAGGCGGCTTCTAGGTATGT | |
| | | GGCAGCCCCCCACGCACAATGTCCCGGGCATCGAGAGAAACTG | |
| | | GTACGAGAGCTGTTTTAGATCCCACGCTGCTGTTTGTGGCTGTG | |
| | | GCGATTTTGTTGGCCATCTTAATCATCTGGCAACTACTCTGGGTC | |
| | | GTCCTCCGCGTCCTGGGCCCCCAGGCGGACCCCGCACGCCGC | |
| | | AAATAAGAAACCTGCCAGCGCTCCCGGCGCCCCAGGGCGAGCC | |
| | | CGGTGACAGAGCGCCATGGCATGGGGCTTCTGGGGCCGACGCC | |
| | | GCCGGTGGAGACGATGGAGAGCGCGGCGCAGACGGTGGAGAC | |
| | | CCCGCAGACGTAGGAGACGACGCCCTACTCGCCGCTTTCGAGC | |
| | | TCGTCGAAGAGTAA | |
| CAF05736.1 | AJ620222.1 | ATGGCATGGGGCTTCTGGGGCCGACGCCGCCGGTGGAGACGAT | 130 |
| | | GGAGAGCGCGGCGCAGACGGTGGAGACCCCGCAGACGTAGGA | |
| | | GACGACGCCCTACTCGCCGCTTTCGAGCTCGTCGAAGAGTAAG | |
| | | GAGGCGCGGGGGGAGGTGGCGCAGACGCTACAGAAAATGGCG | |
| | | ACGGGGCAGACGCAGACGGACTCATAGAAAAAAGATAGTCATAA | |
| | | AACAGTGGCAACCAAACTTTATAAGACGCTGCTACGTCATAGGG | |
| | | TACTTACCACTTATATTCTGCGGCGAAAATACAACCGCCCAGAAC | |
| | | TTTGCCACTCACTCGGACGACATGATAAGCAAAGGACCGTACGG | |
| | | GGGGGGCATGACTACCACCAAATTCACTCTGAGAATACTGTACG | |
| | | ACGAGTTTACCAGGTTTATGAACTTTTGGACTGTCAGTAACGAAG | |
| | | ACCTAGACCTGTGTAGATACGTGGGCTGCAAACTAATATTTTTTA | |
| | | AACACCCCACGGTGGACTTTATAGTACAGATAAACACTCAGCCT | |
| | | CCTTTCTTAGACACGCACCTCACCGCGGCCAGCATACACCCGGG | |
| | | CATCATGATGCTCAGCAAGAGACACATACTAATACCCTCTCTAAA | |
| | | GACCCGGCCCAGCAGAAAACACAGGGTGGTCGTCAGGGTGGGC | |
| | | GCCCCAAGACTTTTTCAGGACAAGTGGTACCCCCAGTCAGACCT | |
| | | GTGTGACACAGTTCTGCTTTCCATATTTGCAACCGCCTGCGACTT | |
| | | GCAATATCCGTTCGGCTCACCACTAACTGACAACCCTTGCGTCA | |
| | | ACTTCCAGATCCTGGGGCCCCAGTACAAAAAACACCTTAGTATTA | |
| | | GCTCCACTATGGATCAAACTAACGAAAACCATTATAAAGAAAACT | |
| | | TATTTAACAAAACTGAACTATACAACACCTTTCAAACCATAGCTCA | |
| | | GCTTAAAGAGACAGGACACATTTCAGGCATTAGTCCTACTTGGAA | |
| | | TGAAGTCCAGAATTCAACAACACTTACTAAAGGAGGTGACAATGC | |
| | | CACTCAGAGTAGAGACACTTGGTATAAAGGAAATACATACAACGA | |
| | | GAAGATATGCGAGTTAGCACAAATAACCAGAAACAGATTTAAAAA | |
| | | TGCAACCAAAGGAGCACTACCAAACTACCCCACAATAATGTCCA | |
| | | CAGACCTATATGAATACCACTCAGGCATACACTCCAGCATATATC | |
| | | TATCAGCTGGCAGGAGCTACTTTGAAACCACCGGGGCCTACTCT | |
| | | GACATTATATACAACCCTTTCACAGACAAAGGCACAGGCAACATA | |
| | | ATCTGGATAGACTACCTCACAAAAGAAGACACCATTTTTGTGAAA | |
| | | AACAAAAGCAAATGCGAGATAATGGACATGCCCCTGTGGGCGGC | |
| | | CTGCACAGGATACACAGAGTTTTGTGCAAAGTATACAGGCGACT | |
| | | CTGCCATTATCTACAATGCAAGAATACTCATAAGATGCCCATACA | |
| | | CTGAGCCCATGTTAATAGACCACTCAGACCCAAACAAAAGCTTC | |
| | | GTTCCCTACTCATTTAACTTTGGCAACGGAAAGATGCCCGGAGG | |
| | | CAGCTCCAACGTGCCCATAAGAATGAGAGCCAAGTGGTACGTGA | |
| | | ACATATTCCACCAAAAAGAAGTATTAGAGAGCATAGTACAGTCCG | |
| | | GACCGTTTGGGTACAAGGGCGACATAAGATCAGCTGTACTAGCC | |
| | | ATGAAATACAGATTTCACTGGAAGTGGGGCGGAAACCCTATATC | |
| | | CAAACAGGTCGTCAGGAATCCCTGCTCCAACTCCAGCTCCTCCG | |
| | | CGGCCCATAGAGGACCTCGCAGCGTACAAGCGGTTGACCCGAA | |
| | | ATACAATACCCCAGAGGTCACGTGGCACTCGTGGGACATTAGAC | |
| | | GAGGACTCTTTGGCAAAGCAGGTATTAAAAGAATGCAACAGGAA | |
| | | TCAGATGCTCTTTACATTCCTCCAGGACCAATCAAGAGACCTCGC | |
| | | AGGGACACCAACGCCCAAGACCCAGAAGAGCAAAACGAAAGCT | |
| | | CAGGTTTCAGAGTCCAGCAGCGACTCCCGTGGGTCCACTCCAG | |
| | | CCAAGAGACGCAAAGCTCCCAAGAAGAGACGGAGGCGCAGGGG | |
| | | TCGGTACAAGACCAACTACTCCTCCAGCTCCGAGAGCAGCGAGT | |
| | | TCTCCGACTCCAGCTCCAGCAACTCGCAACCCAAGTCCTCAAAG | |
| | | TCCAAGCAGGGCACAGCCTACACCCCCTATTATCTTCCCAAGCA | |
| | | TAA | |
| CAF05737.1 | AJ620223.1 | ATGCGTTTTCGCAGGGTTGCCCAGAAAAGGAAAGTGCTTTTGCA | 131 |
| | | AACTGTGCCAGCTGCAAAGAAGGCTAGGCGGCTTCTAGGTATGT | |
| | | GGCAGCCCCCCACGCACAATGTCCCGGGCATCGAGAGAAACTG | |
| | | GTACGAGAGCTGTTTTAGATCCCACGCTGCTGTTTGTGGCTGTG | |
| | | GCGATTTTGTTGGCCATCTTAATCATCTGGCAACTACTCTGGGTC | |
| | | GTCCTCCGCGTCCTGGGCCCCCAGGCGGACCCCGCACGCCGC | |
| | | AAATAAGAAACCTGCCAGCGCTCCCGGCGCCCCAGGGCGAGCC | |
| | | CGGTGACAGAGCGCCATGGCATGGGGCTTCTGGGGCCGACGCC | |
| | | GCCGGTGGAGACGATGGAGAGCGCGGCGCAGACGGTGGAGAC | |
| | | CCCGCAGACGTAGGAGACGACGCCCTACTCGCCGCTTTCGAGC | |
| | | TCGTCGAAGAGTAA | |
| CAF05738.1 | AJ620223.1 | ATGGCATGGGGCTTCTGGGGCCGACGCCGCCGGTGGAGACGAT | 132 |
| | | GGAGAGCGCGGCGCAGACGGTGGAGACCCCGCAGACGTAGGA | |
| | | GACGACGCCCTACTCGCCGCTTTCGAGCTCGTCGAAGAGTAAG | |
| | | GAGGCGCGGGGGGAGGTGGCGCAGACGCTACAGAAAATGGCG | |
| | | ACGGGGCAGACGCAGACGGACTCATAGAAAAAAGATAGTCATAA | |
| | | AACAGTGGCAACCAAACTTTATAAGACGCTGCTACATCATAGGGT | |
| | | ACTTACCACTTATATTCTGCGGCGAAAATACAACCGCCCAGAACT | |
| | | TTGCCACTCACTCGGACGACATGATAAGCAAAGGACCGTACGGG | |
| | | GGGGGCATGACTACCACCAAATTCACTCTGAGAATACTGTACGA | |
| | | CGAGTTTACCAGGTTTATGAACTTTTGGACTGTCAGTAACGGAGA | |
| | | CCTAGACCTGTGTAGATACGTGGGCTGCAAACTAATATTTTTTAA | |
| | | ACACCCCACGGTGGACTTTATAGTACAGATAAACACTCAGCCTC | |
| | | CTTTCTTAGACACGCACCTCACCGCGGCCAGCATACACCCGGGC | |
| | | ATCATGATGCTCAGCAAGAGACACATACTAATACCCTCTCTAAAG | |
| | | ACCCGGCCCAGCAGAAAACACAGGGTGGTCGTCAGGGTGGGCG | |
| | | CCCCAAGACTTTTTCAGGACAAGTGGTACCCCCAGTCAGACCTG | |
| | | TGTGACACAGTTCTGCTTTCCATATTTGCAACCGCCTGCGACTTG | |
| | | CAATATCCGTTCGGCTCACCACTAACTGACAACCCTTGCGTCAAC | |
| | | TTCCAGATCCTGGGGCCCCAGTACAAAAAACACCTTAGTATTAG | |
| | | CTCCACTATGGATCAAACTAACGAAAACCATTATAAAGAAAACTT | |
| | | ATTTAACAAAACTGAACTATACAACACCTTTCAAACCATAGCTCA | |
| | | GCTTAAAGAGACAGGACACATTTCAGGCATTAGTCCTACTTGGAA | |
| | | TGAAGTCCAGAATTCAACAACACTTACTAAAGAAGGTGACAATGC | |
| | | CACTCAGAGTAGAGACACTTGGTATAAAGGAAATACATACAACG | |
| | | GTAAGATATGCCAGTTAGCACAAATAACCAGAAACAGGTTTAAAA | |
| | | ATGCAACCAAAGGAGCACTACCAAACTACCCCACAATAATGTCC | |
| | | ACAGACCTATATGAATACCACTCAGGCATATACTCCAGCATATGT | |
| | | CTATCAGCTGGCAGGAGCTACTTTGAAACCACCGGGGCCTACTC | |
| | | TGACATTATATACAACCCTTTCACAGACAAAGGCACAGGCAACAT | |
| | | AATCTGGATAGACTACCTCACAAAAGAAGACACCATTTTTGTGAA | |
| | | AAACAAAAGCAAATGCGAGATAATGGACATGCCCCTGTGGGCGG | |
| | | CCTGCACAGGATACACAGAGTTTTGTGCAAAGTATACAGGCGAC | |
| | | TCTGCCATTATCTACAATGCAAGAATACTCATAAGATGCCCATAC | |
| | | ACTGAGCCCATGTTAATAGACCACTCAGACCCAAACAAAGGCTT | |
| | | CGTTCCCTACTCATTTAACTTTGGCAACGGAAAGATGCCCGGAG | |
| | | GCAGCTCCAACGTGCCCATAAGAATGAGAGCCAAGTGGTACGTG | |
| | | AACATATTCCACCAAAAAGAAGTATTAGAGAGCATAGTACAGTCC | |
| | | GGACCGTTTGGGTACAAGGGCGACATAAAATCAGCTGTACTAGC | |
| | | CATGAAATACAGATTTCACTGGAAGTGGGGCGGAAACCCTATAT | |
| | | CCAAACAGGTCGTCAGGAATCCCTGCTCCAACTCCAGCTCCTCC | |
| | | GCGGCCCATAGAGGACCTCGCAGCGTACAAGCGGTTGACCCGA | |
| | | AATACAATACCCCAGAGGTCACGTGGCACTCGTGGGACATTAGA | |
| | | CGAGGACTCTTTGGCAAAGCAGGTATTAAAAGAATGCAACAGGA | |
| | | ATCAGATGCTCTTTACATTCCTCCAGGACCAATCAAGAGACCTCG | |
| | | CAGGGACACCAACGCCCAAGACCCAGAAGAGCAAAACGAAAGC | |
| | | TCAGGTTTCAGAGTCCAGCAGCGACTCCCGTGGGTCCACTCCAG | |
| | | CCAAGAGACGCAAAGCTCCCAAGAAGAGACGGAGGCGCAGGGG | |
| | | TCGGTACAAGACCAACTACTCCTCCAGCTCCGAGAGCAGCGAGT | |
| | | TCTCCGACTCCAGCTCCAGCAACTCGCAACCCAAGTCCTCAAAG | |
| | | TCCAAGCAGGGCACAGCCTACACCCCCTATTATCTTCCCAAGCA | |
| | | TAA | |
| CAF05778.1 | AJ620224.1 | ATGCGTTTTCGCAGGGTTGCCCAGAAAAGGAAAGTGCTTTTGCA | 133 |
| | | AACTGTGCCAGCTGCAAAGAAGGCTAGGCGGCTTCTAGGTATGT | |
| | | GGCAGCCCCCCACGCACAATGTCCCGGGCATCGAGAGAAACTG | |
| | | GTACGAGAGCTGTTTTAGATCCCACGCTGCTGTTTGTGGCTGTG | |
| | | GCGATTTTGTTGGCCATCTTAATCATCTGGCAACTACTCTGGGTC | |
| | | GTCCTCCGCGTCCTGGGCCCCCAGGCGGACCCCGCACGCCGC | |
| | | AAATAAGAAACCTGCCAGCGCTCCCGGCGCCCCAGGGCGAGCC | |
| | | CGGTGACAGAGCGCCATGGCATGGGGCTTCTGGGGCCGACGCC | |
| | | GCCGGTGGAGACGATGGAGAGCGCGGCGCAGACGGTGGAGAT | |
| | | CCCGCAGACGTAGGAGACGACGCCCTACTCGCCGCTTTCGAGC | |
| | | TCGTCGAAGAGTAA | |
| CAF05779.1 | AJ620224.1 | ATGGCATGGGGCTTCTGGGGCCGACGCCGCCGGTGGAGACGAT | 134 |
| | | GGAGAGCGCGGCGCAGACGGTGGAGATCCCGCAGACGTAGGA | |
| | | GACGACGCCCTACTCGCCGCTTTCGAGCTCGTCGAAGAGTAAG | |
| | | GAGGCGCGGGGGGAGGTGGCGCAGACGCTACAGAAAATGGCG | |
| | | ACGGGGCAGACGCAGACGGACTCATAGAAAAAAGATAGTCATAA | |
| | | AACAGTGGCAACCAAACTTTATAAGACGCTGCTACATCATAGGGT | |
| | | ACTTACCACTTATATTCTGCGGCGAAAATACAACCGCCCAGAACT | |
| | | TTGCCACTCACTCGGACGACATGATAAGCAAAGGACCGTACGGG | |
| | | GGGGGCATGACTACCACCAAATTCACTCTGAGAATACTGTACGA | |
| | | CGAGTTTACCAGGTTTATGAACTTTTGGACTGTCAGTAACGAAGA | |
| | | CCTAGACCTGTGTAGATACGTGGGCTGCAAACTAATATTTTTTAA | |
| | | ACACCCCACGGTGGACTTTATAGTACAGATAAACACTCAGCCTC | |
| | | CTTTCTTAGACACGCACCTCACCGCGGCCAGCATACACCCGGGC | |
| | | ATCATGATGCTCAGCAAGAGACACATACTAATACCCTCTCTAAAG | |
| | | ACCCGGCCCAGCAGAAAGCACAGGGTGGTCGTCAGGGTGGGC | |
| | | GCCCCAAGACTTTTTCAGGACAAGTGGTACCCCCAGTCAGACCT | |
| | | GTGTGACACAGTTCTGCTTTCCATATTTGCAACCGCCTGCGACTT | |
| | | GCAATATCCGTTCGGCTCACCACTAACTGACAACCCTTGCGTCA | |
| | | ACTTCCAGATCCTGGGGCCCCAGTACAAAAAACACCTTAGTATTA | |
| | | GCTCCACTATGGATCAAACTAACGAAAACCATTATAAAGAAAACT | |
| | | TATTTAACAAAACTGAACTATACAACACCTTTCAAACCATAGCTCA | |
| | | GCTTAAAGAGACAGGACACATTTCAGGCATTAGTCCTACTTGGAA | |
| | | TGAAGTCCAGAATTCAACAACACTTACTAAAGGAGGTGACAATGC | |
| | | CACTCAGAGTAGAGACACTTGGTATAAAGGAAATACATACAACGA | |
| | | GAACATATGCAAGTTAGCAGAGGTAACCAGAAACAGATTTAAAAA | |
| | | TGCAACCAAAGGAGCACTACCAAACTACCCCACAATAATGTCCA | |
| | | CAGACCTATATGAATACCACTCAGGCATATACTCCAGCATATATC | |
| | | TATCAGCGGGCAGGAGCTACTTTGAAACCACCGGGGCCTACTCT | |
| | | GACATTATATACAACCCTTTCACAGACAAAGGCACAGGCAACATA | |
| | | ATCTGGATAGACTACCTCACAAAAGAAGACACCATTTTTGTGAAA | |
| | | AACAAAAGCAAATGCGAAATAATGGACATGCCCCTGTGGGCGGC | |
| | | CTGCACGGGATACACAGAGTTTTGTGCAAAGTATACAGGCGACT | |
| | | CTGCCATTATCTACAATGCAAGAATACTCATAAGATGCCCATACA | |
| | | CTGAGCCCATGTTAATAGACCACTCAGACCCAAACAAAGGCTTC | |
| | | GTTCCCTACTCATTTAACTTTGGCAACGGAAAGATGCCCGGAGG | |
| | | CAGCTCCAACGTGCCCATAAGAATGAGAGCCAAGTGGTACGTGA | |
| | | ACATATTCCACCAAAAAGAAGTATTAGAGAGCATAGTACAGTCCG | |
| | | GACCGTTTGGGTACAAGGGCGACATAAAATCAGCTGTACTAGCC | |
| | | ATGAAATACAGATTTCACTGGAAGTGGGGCGGAAACCCTATATC | |
| | | CAAACAGGTCGTCAGGAATCCCTGCTCCAACTCCAGCCCCTCCG | |
| | | CGGCCCATAGAGGACCTCGCAGCGTACAAGCGGTTGACCCGAA | |
| | | ATACAATACCCCAGAGGTCACGTGGCACTCGTGGGACATTAGAC | |
| | | GAGGACTCTTTGGCAAAGCAGGTATTAAAAGAATGCAACAGGAA | |
| | | TCAGATGCTCTTTACATTCCTCCAGGACCAATCAAGAGACCTCGC | |
| | | AGGGACACCAACGCCCAAGACCCAGAAGAGCAAAACGAAAGCT | |
| | | CAGGTTTCAGGGTCCAGCAGCGACTCCCGTGGGTCCACTCCAG | |
| | | CCAAGAGACGCAAAGCTCCCAAGAAGAGACGGAGGCGCAGGGG | |
| | | TCGGTACAAGACCAACTACTCCTCCAGCTCCGAGAGCAGCGAGT | |
| | | TCTCCGACTCCAGCTCCAGCAACTCGCAACCCAAGTCCTCAAAG | |
| | | TCCAAGCAGGGCACAGCCTACACCCCCTATTATCTTCCCAAGCA | |
| | | TAA | |
| CAF05739.1 | AJ620225.1 | ATGCGTTTTCGCAGGGTTGCCCAGAAAAGGAAAGTGCTTTTGCA | 135 |
| | | AACTGTGCCAGCTGCAAAGAAGGCTAGGCGGCTTCTAGGTATGT | |
| | | GGCAGCCCCCCACGCACAATGTCCCGGGCATCGAGAGAAACTG | |
| | | GTACGAGAGCTGTTTTAGATCCCACGCTGCTGTTTGTGGCTGTG | |
| | | GCGATTTTGTTGGCCATCTTAATCATCTGGCAACTACTCTGGGTC | |
| | | GTCCTCCGCGTCCTGGGCCCCCAGGCGGACCCCGCACGCCGC | |
| | | AAATAAGAAACCTGCCAGCGCTCCCGGCGCCCCAGGGCGAGCC | |
| | | CGGTGACAGAGCGTCATGGCGTGGGGCTTCTGGGGCCGACGCC | |
| | | GCCGGTGGAGACGATGGAGAGCGCGGCGCAGACGGTGGGGAC | |
| | | CCCGCAGACGTAGGAGACGACGCCCTCCTC | |
| CAF05740.1 | AJ620225.1 | ATGGCGTGGGGCTTCTGGGGCCGACGCCGCCGGTGGAGACGA | 136 |
| | | TGGAGAGCGCGGCGCAGACGGTGGGGACCCCGCAGACGTAGG | |
| | | AGACGACGCCCTCCTCGCCGCTTTCGAGCTCGTCGAAGAGTAAG | |
| | | GAGGCGCGGGGGGAGGTGGCGCAGACGCTACAGAAAATGGCG | |
| | | ACGGGGCAGACGCAGACGGACTCACAGAAAAAAGATAGTCATAA | |
| | | AACAGTGGCAACCAAACTTTATAAGACGCTGCTACATCATAGGGT | |
| | | ACTTACCACTTATATTCTGCGGCGAAAATACAACCGCCCAGAACT | |
| | | TTGCCACTCACTCGGACGACATGATAAGCAAAGGACCGTACGGG | |
| | | GGGGGCATGACTACCACCAAATTCACTCTGAGAATACTGTACGA | |
| | | CGAGTTTACCAGGTTTATGAACTTTTGGACTGTCAGTAACGAAGA | |
| | | CCTAGACCTGTGTAGATACGTGGGCTGCAAACTAATATTTTTTAA | |
| | | ACACCCCACGGTGGACTTTATAGTACAGATAAACACTCAGCCTC | |
| | | CTTTCTTAGACACGCACCTCACCGCGGCCAGCATACACCCGGGC | |
| | | ATCATGATGCTCAGCAAGAGACACATACTAATACCCTCTCTAAAG | |
| | | ACCCGGCCCAGCAGAAAACACAGGGTGGTCGTCAGGGTGGGCG | |
| | | CCCCAAGACTTTTTCAGGACAAGTGGTACCCCCAGTCAGACCTG | |
| | | TGTGACACAGTTCTGCTTTCCATATTCGCAACCGCCTGCGACTTG | |
| | | CAATATCCGTTCGGCTCACCACTAACTGACAACCCTTGCGTCAAC | |
| | | TTCCAGATCCTGGGGCCCCAGTACAAAAAACACCTTAGTATTAG | |
| | | CTCCACTATGGATGACACTAACAAAGCACATTATGAAGAAAACTT | |
| | | ATTTAATAAAACTGAACTATACAACACCTTTCAAACCATAGCTCAG | |
| | | CTTAGAGACACAGGACAAACTGCAAACGCTAGTCCTAATTGGAA | |
| | | TGAGGTCCAGAATACAGCAGCACTTCAGTTATCAGGTGCAAATG | |
| | | CCACTAGCAGCAAAGACACTTGGTATAAAGGTAATACATACACGA | |
| | | AAGACATATCAAAGTTAGCAGAAAAAACCAGACAAAGATTTAAAG | |
| | | CTGCAACAATAGCAGCACTACCAAACTACCCCACAATAATGTCCA | |
| | | CAGACCTATATGAATACCACTCAGGCATATACTCCAGCATATATT | |
| | | TATCAGCTGGCAGGAGCTACTTTGAAACCACCGGGGCCTACTCT | |
| | | GACATTATATACAACCCTTTCACAGACAAAGGCACAGGCAACATA | |
| | | ATCTGGATAGACTACCTCACAAAAGAAGACACCATTTTTGTAAAA | |
| | | AACAAAAGCAAATGCGAGATAATGGACATGCCCCTGTGGGCGGC | |
| | | CTGCACAGGATACACAGAGTTTTGTGCAAAGTATACAGGCGACT | |
| | | CTGCCATTATCTACAATGCAAGAATACTCATAAGATGCCCATACA | |
| | | CTGAGCCCATGTTAATAGACCACTCAGACCCAAACAAAGGCTTC | |
| | | GTTCCCTACTCATTTAACTTTGGCAACGGAAAGATGCCCGGAGG | |
| | | CAGCTCCAACGTACCGATAAGAATGAGAGCCAAATGGTACGTGA | |
| | | ACATATTCCACCAAAAGGAGGTTCTAGAGGCTATAGTACAAAGC | |
| | | GGACCGTTCGGGTACAAGGGCGACATAAAATCAGCTGTACTAGC | |
| | | CATGAAATACAGATTTCACTGGAAGTGGGGCGGAAACCCTATAT | |
| | | CCAAACAGGTCGTCAGGAATCCCTGCTCCAACTCCAGCTCATCC | |
| | | GCGGCCCATAGAGGACCTCGCAGCGTACAAGCGGTTGACCCGA | |
| | | AATACAATACCTCAGAGGTCACGTGGCACTCGTGGGACATTAGA | |
| | | CGAGGACTCTTTGACAAAGCAGGTATTAAAAGAATGCAACAGGA | |
| | | ATCAGATGCTCTTTACATTCCTCCAGGACCAATCAAGAGACCTCG | |
| | | CAGGGACACCAACGCCCAAGACCCAGAAGAGCAAAACGAAAGC | |
| | | TCAGGTTTCAGAGTCCAGCAGCGACTCCCGTGGGTCCACTCCAG | |
| | | CCAAGAGACGCAAAGCTTCCAAGAAGAGACGGAGGCGCAGGGG | |
| | | TCGGTACAAGACCAACTACTCCTCCAGCTCCGAGAGCAGCGAGT | |
| | | TCTCCGACTCCAGCACCAGCAACTCGCAACCCAAGTCCTCAAAG | |
| | | TCCAAGCAGGGCACAGCCTACACCCCCTATTATCTTCCCAAGCA | |
| | | TAA | |
| CAF05741.1 | AJ620226.1 | ATGCGTTTTTCCAGGATTGCTCGCTCGAAAAGGAAAGTGCCACT | 137 |
| | | GCCAACACTGCCAATACCACCGCCGCCTGGGACTATGAGCTGG | |
| | | CGCCCTCCGGTCCACAATGCCGCTGGAATCGACCGTAACTGGTT | |
| | | CGAATCCTGTTTCAGATCTCACGCTAGCAGTTGCGGCTGTGGAA | |
| | | ATTTTATTGGCCATCTTAATACTCTCGCTACTCGCTACGGCTTTAC | |
| | | TCCTGGGCCCGCGCCGCCGCCTGGTGGTCCAGGCCCGCGGCC | |
| | | GCCAGTACCAGTGAGGCCCCGGCACCTGGCCGGAGACGGTAAC | |
| | | CAGCCCAGGGCCCTGCCATGGCGTGGGGATGGTGGAGACGCA | |
| | | GACGCTGGCCCACCTACAGAAGGTGGCGGCGCTGGAGACGCC | |
| | | GCAGGAGAGTACCGCGACGAAGACCTCGAAGAGCTGTTCGCCG | |
| | | CTATGGAAAGAGACGAGTAA | |
| CAF05742.1 | AJ620226.1 | ATGGTGGAGACGCAGACGCTGGCCCACCTACAGAAGGTGGCGG | 138 |
| | | CGCTGGAGACGCCGCAGGAGAGTACCGCGACGAAGACCTCGAA | |
| | | GAGCTGTTCGCCGCTATGGAAAGAGACGAGTAAGGAGGCGCCG | |
| | | GTGGGGAGGCGGCGGTACCGAAGGGGCTACAGACGCAGGGTC | |
| | | GCGGTCAGACTGAGACGCAGACGCAGACGGGGACGTAAGAGAC | |
| | | TTGTACTTACTCAGTGGCAGCCCCAGACCCGTAGAAAGTGCACC | |
| | | ATCACCGGGTACCTCCCGGTGGTATGGTGCGGCTACCTCCGGG | |
| | | CCGCCAAAAACTATGCCTACCACTCTGACGACTCCACAAAGCAG | |
| | | CCGGACCCCTTTGGGGGCGCGCTGAGCACTACCTCCTTTAACCT | |
| | | TAAGGTGCTGTACGACCAGCACCAGAGAGGACTCAACAGGTGG | |
| | | TCTTTCCCTAACGACCAACTGGACCTAGCTCGCTACAGGGGGTG | |
| | | CACACTTACGTTCTACAGACAGAAAGCCACTGACTTTATAGCTAT | |
| | | TTATGACATCTCCGCCCCATACAAACTAGACAAGTACAGCTCTCC | |
| | | CAGCTATCACCCCGGCAACATGATAATGCAGAAAAAGAAAATTCT | |
| | | CATTCCCAGCTACGACACTAACCCCAGGGGCCGCCAAAAAATAG | |
| | | TAGTTAAAATCCCCCCCCCTAAACTGTTCGTGGATAAGTGGTATG | |
| | | CACAGGAGGACCTGTGCGACGTTAATCTTGTGACACTTGCGGTC | |
| | | AGCGCAGCTTCCTTTACACATCCGTTCGGCTCACCACTAACGAA | |
| | | CAACCCTTGTGTAACCTTCCAGGTACTTGACTCAATATACTATTC | |
| | | CGTAATAGGTTACGGTTCCTCAGATCAGAAAAAAAAACAAGTACT | |
| | | TGAAACTCTCTATAACGAAAATGCATACTGGGCCTCACACTTAAC | |
| | | TCCTTACTTTACCACTGGCCTTAAAATTCCATATCCAGATACTAAG | |
| | | AATCCCAGCACTACTGCATCTGTTACTCCAAACACGCTATTTACA | |
| | | ACAGGTAGCTACGACTCAAACATTAAAATAGCAGGAGACAGCAA | |
| | | CTACAACTGGTACCCCTACAACCTTAAAAACAAAATAGACAAACT | |
| | | TCATAAAATTAGAGAACAATACTTTAAATGGGAAACAGATGAAGG | |
| | | CCCCCAAGCCACATCTGATTATGGCAAACACCACACTTGGACTA | |
| | | AACCCACCGATGACTACTACGAATACCACCTAGGTTTATTTAGTC | |
| | | CCATATTCATAGGACCCACCAGAAGCAACAAACTATTTGCAACCG | |
| | | CCTACCAGGACGTTACTTACAACCCCCTAAACGACAAGGCGGTG | |
| | | GGAAACAAGTTCTGGTTTCAGTACAACACAAAAGCAGACACCCA | |
| | | GGTGGCCAAACAAGGCTGCTACTGCATGCTAGAAGACATTCCCC | |
| | | TCTGGGCCGCCATGTATGGCTACTCTGACTTTATAGAGACCGAG | |
| | | CTAGGCCCCTTCCAAGACGCAGAGACGGTGGGCTATATCTGTGT | |
| | | AATATGCCCCTACACCGAGCCCCCCATGTACAACAAACACAATC | |
| | | CCATGCAGGGTTACGTGTTTTATGACTCGTTTTTTGGCAATGGCA | |
| | | AGTGGATAGACGGACGGGGACACATAGAGCCTTACTGGCTCTG | |
| | | CCGCTGGAGGCCAGAAATGCTTTTCCAGCAGCAGGTTATGAGAG | |
| | | ACATTGTGCAGACCGGGCCCTGGAGCTATAAAGACGAAAGCAAA | |
| | | AACTGTGTTCTGCCCATGAAGTATAAGTTCAGATTCACATGGGGC | |
| | | GGCAATATGGTCTCCCAACAGACAATCAGAAACCCCTGCAAGAC | |
| | | TGACGGACAACTTGCCCCCTCCGGTAGACAGCCTAGAGAAGTAC | |
| | | AAGTTGTTGACCCACTCACCATGGGTCCCCGCTGGGTTTTCCAC | |
| | | TCCTGGGACTGGAGACGTGGCTACCTTAGTGAGACAGCTCTCAG | |
| | | ACGCCTGCGAGAAAAACCACTCGACTATGAGGCGTATATGCAAA | |
| | | AACCAAAAAGACCTAGACTGTTCCCTGTTACAGAGGGCGACGAC | |
| | | CAGTCCCCGCAGCAAGGCGACGACTGGTGTTCAGAGGAAGAAA | |
| | | AGTCGCCGCAGTTTACCGAAGAGACGACGCAGACGCTACAGCT | |
| | | CCAGCTCCAGCGCCAGCTCCGGCGACAGCAGCGACTCGGAGAG | |
| | | CAGCTCCAACTCCTACAACACCACCTCCTCAAAACGCAAGCGGG | |
| | | CCTCCAAATAAACCCATTATTATTGGTCCGGCAGTAA | |
| CAF05743.1 | AJ620227.1 | ATGCACTTTTCTCGAATAAGCAGAAAGAAAGGGAAAGTGCTACT | 139 |
| | | GCTTTGCGTGCCAGCAGTTAAGAAAAAACCAACTGCTATGAGCT | |
| | | TCTGGAGACCTCCGATGCACAATGTCACGGGGATCCAACGCCTG | |
| | | TGGTACGAGTCCTTTCACCGTGGCCATGCTGCTTTTTGTGGTTGT | |
| | | GGGGATCCTGTACTTCACATTACTGCACTTGCTGAGACATATGG | |
| | | CCATCCAACAGGCCCGAGACCTTCTGGGTCATCGGGAATAGATC | |
| | | CCACTCCGCCCATCCGTAGAGCCAGGCCTGCCCCGGCCGCTCC | |
| | | GGAACCCCCACAGGTTGACTCCAGACCGGCCCTGCCATGGCAT | |
| | | GGAGATGGTGGAAGCGACGGAGGCGCTGGTGGCTCCGCAAGC | |
| | | GGTGGACCCGTGGCAGACTTCGCAGACGATGGCCTAGACCAGC | |
| | | TCGTCGCCGCCCTAGACGACGAAGAGTAA | |
| CA F05744.1 | AJ620227. 1 | ATGGCATGGAGATGGTGGAAGCGACGGAGGCGCTGGTGGCTCC | 140 |
| | | GCAAGCGGTGGACCCGTGGCAGACTTCGCAGACGATGGCCTAG | |
| | | ACCAGCTCGTCGCCGCCCTAGACGACGAAGAGTAAGGAGACGC | |
| | | AGACGGTGGAGGAGGGGGCGACCCAGACGCAGGCTGTACCGA | |
| | | CGCTACAGACGCAAAAAACGTAGGAGACGAAAGCCCAAAATAAT | |
| | | CTTAAAACAATGGCAGCCAGACATTGTAAAGAGGTGCTACATAGT | |
| | | GGGCTACATTCCTGCCATAATATGTGGGGCGGGCACCTGGTCTC | |
| | | ACAACTACACCAGCCACCTCCTAGACATTATCCCCAAAGGACCC | |
| | | TTTGGAGGAGGGCACAGCACTATGAG [symbol] GTTCTCCCTAAAAGTACT | |
| | | CTTTGAAGAACACCTCAGACACTTAAACTTTTG GACAAAAAG CAA | |
| | | CCAGGACCTAGAACTCATAAGATACTTTAGATGCTCCTTTAAATT | |
| | | CTATAGAGACCAAGACACAGACTACATAGTACACTACAGCAGAA | |
| | | AAACTCCCCTGGGAGGAAACAGACTAACAGCGCCTAGCCTACAC | |
| | | CCCGGTGTACAGATGCTTAGCAAAAACAAAATATTAGTACCTAGC | |
| | | TATGCTACAAAACCCAAGGGTGGGAGCTATGTAAAAGTAACCAT | |
| | | AGCACCCCCCACACTACTAACTGACAAGTGGTACTTTAGCAAAG | |
| | | ACATTTGTGACACAACCTTGGTTAACTTAGACGTTGTACTCTGCA | |
| | | ACTTGCGGTTTCCGTTCTGCTCACCACAAACTGACAACCCTTGCA | |
| | | TCACATTCCAAGTTCTGCATTCCTTGTACAACGACTTCCTCTCCA | |
| | | TAGTAGATACTGAAAATTACAAAACCACTTTTGTTACTACACTGAC | |
| | | AACAAAATTAGGTACAACATGGGGTTCAAGACTAAATACATTTAG | |
| | | AACAGAAGGCTGCTACTCACACCCTAAACTACCTAAAAAACAACT | |
| | | AATTGCTGCAAATGACACAACATACTTTACATCACCTGATGGGCT | |
| | | CTGGGGAGACGCAGTTTTCGACATCTCAAAACCTCAAGTAATTAC | |
| | | CGAAAATATGGAGTCTTACGCTAACTCAGCCAAACAAAGAGGGG | |
| | | TGAACGGAGACCCCGCTTTTTGCCACCTAACAGGAATATACTCA | |
| | | CCTCCCTGGCTAACACCAGGCAGAATATCCCCTGAAACCCCAGG | |
| | | ACTTTACACAGACGTGACTTACAACCCATACGCTGACAAAGGAG | |
| | | TAGGCAACAGAATATGGGTCGACTACTGCAGTAAAAAAGGCAAC | |
| | | AAATATGACAATACAAGTAAATGCCTTTTAGAAGACATGCCACTA | |
| | | TGGATGGTATGCTTTGGATACGTAGACTGGGTAAAAAAAGAGAC | |
| | | TGGCAACTGGGGTATTCCACTATGGGCTAGAGTACTTATCAGAA | |
| | | GCCCATACGCTGTTCCAAAACTGTATAATGAAGCAGACCCAAACT | |
| | | ATGGATGGGTACCTATTTCTTACTACTTTGGAGAAGGCAAAATGC | |
| | | CAAACGGAGACATGTACGTACCATTTAAAATAAGAATGAAATGGT | |
| | | ACCCTTCAATGTGGAACCAAGAGCCAGTGTTAAATGACTTAGCAA | |
| | | AGAGCGGACCGTTTGCATACAAAAACACAAAAACAAGCGTGACT | |
| | | GTGACTGCCAAATATAAATTTACATTTAACTTCGGGGGCAACCCC | |
| | | GTACCCTCACAGATTGTACAAGATCCCTGCACACAGTCCACCTA | |
| | | CGACATCCCCGGCACCGGTAACCTGCCTCGCAGAACACAAGTC | |
| | | ATTGACCCGAAATTCCTCGGTCCCCACTATTCCTTCCACCGGTG | |
| | | GGACTTCAGGCGTGGCCTCTTTGGCTCACAAGCTATTAAGAGAG | |
| | | TGTCAGAACAACCAACAACTTCTGAGTTTTTATTCTCAGGCCCAA | |
| | | AGAGACCCAGAATCGATCAAGGTCCTTACATCCCGCCAGAAAAA | |
| | | GACTCAGGTTCACTCCAAAGAGAATCGAGACCGTGGAGCAGCTC | |
| | | GGAGACCGAGGCAGAGACAGAAGCCCCCTCGGAAGAAGAGCC | |
| | | GGAGAACCAAGAAGAACAAGTACTCCAGTTGCAGCTCAGACAGC | |
| | | AGCTTCGAGAACAGCGAAAACTCAGACAGGGAATCCAGTGCCTA | |
| | | TTCGAGCAACTGATAACAACCCAACAGGGGGTCCACAAAAACCC | |
| | | ATTGTTAGAGTAG | |
| CAF05745.1 | AJ620228.1 | ATGCACTTTTCTCGAATAAGCAGAAAGAAAAGGAAAGTGCTACTG | 141 |
| | | CTTTGCGTGCCAGCAGTTAAGAAAAAACCAACTGCTATGAGCTTC | |
| | | TGGAGACCTCCGATGCACAATGTCACGGGGATCCAACGCCTGT | |
| | | GGTACGAGTCCCTTCACCGTGGCCATGCTGCTTTTTGTGGTTGT | |
| | | GGGGATCCTGTACTTCACATTACTGCACTTGCTGAGACATATGG | |
| | | CCATCCAACAGGCCCGAGACCTTCTGGGTCATCGGGAATAGATC | |
| | | CCACTCCGCCCATCCGTAGAGCCAGGCCTGCCCCGGCCGCTCC | |
| | | GGAACCCCCACAGGTTGACTCCAGACCGGCCCTGCCATGGCAT | |
| | | GGAGATGGTGGGAGCGACGGAGGCGCTGGTGGCTCCGCAAGC | |
| | | GGTGGACCCGTGGCAGACTTCGCAGACGATGGCCTAGACCAGC | |
| | | TCGTCGCCGCCCTAGACGACGAAGAGTAA | |
| CAF05746.1 | AJ620228.1 | ATGGCATGGAGATGGTGGGAGCGACGGAGGCGCTGGTGGCTC | 142 |
| | | CGCAAGCGGTGGACCCGTGGCAGACTTCGCAGACGATGGCCTA | |
| | | GACCAGCTCGTCGCCGCCCTAGACGACGAAGAGTAAGGAGACG | |
| | | CAGACGGTGGAGGAGGGGGCGACCCAGACGCAGACTGTACCG | |
| | | ACGCTACAGACGCAAAAAACGTAGGAGACGAAAGCCCAAAATAA | |
| | | TCTTAAAACAATGGCAGCCAGACATTGTAAAGAGGTGCTACATAG | |
| | | TGGGCTACATTCCTGCCATAATATGTGGGGCGGGCACCTGGTCT | |
| | | CACAACTACACCAGCCACCTCCTAGACATTATCCCCAAAGGACC | |
| | | CTTTGGAGGAGGGCACAGCACTATGAGGTTCTCCCTAAAAGTAC | |
| | | TCTTTGAAGAACACCTCAGACACTTAAACTTTTGGACAAAAAGCA | |
| | | ACCAGGACCTAGAACTCATAAGATACTTTAGATGCTCCTTTAAAT | |
| | | TCTATAGAGACCAAGACACAGACTACATAGTACACTACAGCAGAA | |
| | | AAACTCCCCTGGGAGGAAACAGACTAACAGCGCCTAGCCTACAC | |
| | | CCCGGTGTACAGATGCTTAGCAAAAACAAAATATTAGTACCTAGC | |
| | | TATGCTACAAAACCCAAGGGTGGGAGCTATGTAAAAGTAACCAT | |
| | | AGCACCCCCCACACTACTAACTGACAAGTGGTACTTTAGCAAAG | |
| | | ACATTTGTGACACAACCTTGGTTAACTTAGACGTTGTACTCTGCA | |
| | | ACTTGCGGTTTCCGTTCTGCTCACCACAAACTGACAACCCTTGCA | |
| | | TCACATTCCAAGTTCTGCATTCCTTGTACAACGACTTCCTCTCTAT | |
| | | AGTAGATACTGAAAATTACAAAACCACTTTTGTTACTACACTGACA | |
| | | ACAAAATTAGGTACAACATGGGGTTCAAGACTAAATACATTTAGA | |
| | | ACAGAAGGCTGCTACTCACACCCTAAACTACCTAAAAAACAACTA | |
| | | ATTGCTGCAAATGACACAACATACTTTACATCACCTGATGGGCTC | |
| | | TGGGGAGACGCAGTTTTCGACATCTCAAAACCTCAAGTAATTACC | |
| | | GAAAATATGGAGTCTTACGCTAACTCAGCCAAACAAAGAGGGGT | |
| | | GAACGGAGACCCCGCTTTTTGCCACCTAACAGGAATATACTCAC | |
| | | CTCCCTGGCTAACACCAGGCAGAATATCCCCTGAAACCCCAGGA | |
| | | CTTTACACAGACGTGACTTACAACCCATACGCTGACAAAGGAGT | |
| | | AGGCAACAGAATATGGGTCGACTACTGCAGTAAAAAAGGCAACA | |
| | | AATATGACAATACAAGTAAATGCCTTTTAGAAGACATGCCACTAT | |
| | | GGATGGTATGCTTTGGATACGTAGACTGGGTAAAAAAAGAGACT | |
| | | GGCAANTGGGGTATTCCACTATGGGCTAGAGTACTTATCAGAAG | |
| | | CCCATACACTGTTCCAAAACTGTATAATGAAGCAGACCCAAACTA | |
| | | TGGATGGGTACCTATTTCTTACTACTTTGGAGAAGGCAAAATGCC | |
| | | AAACGGAGACATGTACGTACCATTTAAAATGAGAATGAAATGGCA | |
| | | CCCTTCAATGTGGAACCAAGAGCCAGTGTTAAATGACTTAGCAAA | |
| | | GAGCGGACCGTTTGCATACAAAAACACAAAAACAAGCGTGACTG | |
| | | TGACTGCCAAATATAAATTTACATTTAACTTCGGGGGCAACCCCG | |
| | | TACCCTCACAGATTGTACAAGGTCCCTGCACACAGTCCACCTAC | |
| | | GACATCCCCGGCACCGGTAACCTGCCTCGCAGAATACAGGTCAT | |
| | | TGACCCGAAATTCCTCGGTCCCCACTATTCCTTCCACCGGTGGG | |
| | | ACTTCAGGCGTGGCCTCTTTGGCTCACAAGCTATTAAGAGAGTG | |
| | | TCAGAACAACCAACAACTTCTGAGTTTTTATTCTCAGGCCCAAAG | |
| | | AGACCCAGAATCGATCAAGGTCCTTACATCCCGCCAGAAAAAGA | |
| | | CTCAGGTTCACTCCAAAGAGAATCGAGACCGTGGAGCAGCTCG | |
| | | GAGACCGAGGCAGAGACAGAAGCCCCCTCGGAAGAAGAGCCG | |
| | | GAGAACCAAGAAGAACAAGTACTCCAGTTGCAGCTCAGACAGCA | |
| | | GCTTCGAGAACAGCGAAAACTCAGACAGGGAATCCAGTGCCTAT | |
| | | TCGAGCAACTGATAACAACCCAACAGGGGGTCCACAAAAACCCA | |
| | | TTGTTAGAGTAG | |
| CAF05747.1 | AJ620229.1 | ATGCACTTTTCTCGAATAAGCAGAAAGAAAAGGAAAGTGCTACTG | 143 |
| | | CTTTGCGTGCCAGCAGTTAAGAAAAAACCAACTGCTATGAGCTTC | |
| | | TGGAGACCTCCGATGCACAATGTCACGGGGATCCAACGCCTGT | |
| | | GGTACGAGTCCCTTCACCGTGGCCATGCTGCTTTTTGTGGTTGT | |
| | | GGGGATCCTGTACTTCACATTACCGCACTTGCTGAGACATATGG | |
| | | CCATCCAACAGGCCCGAGACCTTCTGGGTCATCGGGAATAGATC | |
| | | CCACTCCGCCCATCCGTAGAGCCAGGCCTGCCCCGGCCGCTCC | |
| | | GGAACCCCCACAGGTTGACTCCAGACCGGCCCTGCCATGGCAT | |
| | | GGAGATGGTGGAAGCGACGGAGGCGCTGGTGGCTCCGCAAGC | |
| | | GGTGGACCCGTGGCAGACTTCGCAGACGATGGCCTAGACCAGC | |
| | | TCGTCGCCGCCCTAGACGACGAAGAGTAA | |
| CAF05748.1 | AJ620229.1 | ATGGCATGGAGATGGTGGAAGCGACGGAGGCGCTGGTGGCTCC | 144 |
| | | GCAAGCGGTGGACCCGTGGCAGACTTCGCAGACGATGGCCTAG | |
| | | ACCAGCTCGTCGCCGCCCTAGACGACGAAGAGTAAGGAGACGC | |
| | | AGACGGTGGAGGAGGGGGCGACCCAGACGCAGACTGTACCGA | |
| | | CGCTACAGACGCAAAAAACGTAGGAGACGAAAGCCCAAAATAAT | |
| | | CTTAAAACAATGGCAGCCAGACATTGTAAAGAGGTGCTACATAGT | |
| | | GGGCTACATTCCTGCCATAATATGTGGGGCGGGCACCTGGTCTC | |
| | | ACAACTACACCAGCCACCTCCTAGACATTATCCCCAAAGGACTCT | |
| | | TTGGAGGAGGGCACAGCACTATGAGGTTCTCCCTAAAAGTACTC | |
| | | TTTGAAGAACACCTCAGACACTTAAACTTTTGGACAAAAAGCAAC | |
| | | CAGGACCTAGAACTCATAAGATACTTTAGATGCTCCTTTAAATTCT | |
| | | ATAGAGACCAAGACACAGACTACATAGTACACTACAGCAGAAAA | |
| | | ACTCCCCTGGGAGGAAACAGACTAACAGCGCCTAGCCTACACCC | |
| | | CGGTGTACAGTTGCTTAGCAAAAACAAAATATTAGTACCTAGCTA | |
| | | TGCTACAAAACCCAAGGGTGGGAGCTATGTAAAAGTAACCATAG | |
| | | CACCCCCCACACTACTAACTGACAAGTGGTACTTTAGCAAAGAC | |
| | | ATTTGTGACACAACCTTGGTTAACTTAGACGTTGTACTCTGCAAC | |
| | | TTGCGGTTTCCGTTCTGCTCACCACAAACTGACAACCCTTGCATC | |
| | | ACATTCCAAGTTCTGCATTCCTTGTACAACGACTTCCTCTCTATA | |
| | | GTAGATACTGAAAATTACAAAACCACTTTTGTTACTACACTGACAA | |
| | | CAAAATTAGGTACAACATGGGGTTCAAGACTAAATACATTTAGAA | |
| | | CAGAAGGCTGCTACTCACACCCTAAACTACCTAAAAAACAACTAA | |
| | | TTGCTGCAAATGACACAACATACTTTACATCACCTGATGGGCTCT | |
| | | GGGGAGACGCAGTTTTCAACATCTCAAAACCTCAAGTAATTACC | |
| | | GAAAATATGGAGTCTTACGCTAACTCAGCCAAACAAAGAGGGGT | |
| | | GAACGGAGACCCCGCTTTTTGCCACCTAACAGGAATATACTCAC | |
| | | CTCCCTGGCTAACACCAGGCAGAATATCCCCTGAAACCCCAGGA | |
| | | CTTTACACAGACGTGACTTACAACCCATACGCTGACAAAGGAGT | |
| | | AGGCAACAGAATATGGGTCGACTACTGCAGTAAAAAAGGCAACA | |
| | | AATATGACAATACAAGTAAATGCCTTTTAGAAGACATGCCACTAT | |
| | | GGATGGTATGCTTTGGATACGTAGACTGGGTAAAAAAAGAGACT | |
| | | GGCAACTGGGGTATTCCACTATGGGCTAGAGTACTTATCAGAAG | |
| | | CCCATACACTGTTCCAAAACTGTATAATGAAGCAGACCCAAACTA | |
| | | TGGATGGGTACCTATTTCTTACTACTTTGGAGAAGGCAAAATGCC | |
| | | AAACGGAGACATGTACGTACCATTTAAAATAAGAATGAAATGGCA | |
| | | CCCTTCAATGTGGAACCAAGAGCCAGTGTTAAATGACTTAGCAAA | |
| | | GAGCGGACCGTTTGCATACAAAAACACAAAAACAAGCGTGACTG | |
| | | TGACTGCCAAATATAAATTTACATTTAACTTCGGGGGCAACCCCG | |
| | | TACCCTCACAGATTGTACAAGATCCCTGCACACAGTCCACCTAC | |
| | | GACATCCCCGGCACCGGTAACCTGCCTCGCAGAATACAAGTCAT | |
| | | TGACCCGAAATTCCTCGGTCCCCACTATTCCTTCCACCGGTGGG | |
| | | ACTTCAGGCGTGGCCTCTTTGGCTCACAAGCTATTAAGAGAGTG | |
| | | TCAGAACAACCAACAACTTCTGAGTTTTTATTCTCAGGCCCAAAG | |
| | | AGACCCAGAATCGATCAAGGTCCTTACATCCCGCCAGAAAAAGA | |
| | | CTCAGGTTCACTCCAAAGAGAATCGAGACCGTGGAGCAGCTCG | |
| | | GAGACCGAGGCAGAGACAGAAGCCCCCTCGGAAGAAGAGCCG | |
| | | GAGAACCAAGAAGAACAAGTACTCCAGTTGCAGCTCAGACAGCA | |
| | | GCTTCGAGAACAGCGAAAACTCAGACAGGGAATCCAGTGCCTAT | |
| | | TCGAGCAACTGATAACAACCCAACAGGGGGTCCACAAAAACCCA | |
| | | TTGTTAGAGTAG | |
| CAF05780.1 | AJ620230.1 | ATGCACTTTTCTCGAATAAGCAGAAAGAAAAGGAAAGTGCTACTG | 145 |
| | | CTTTGCGTGCCAGCAGCTAAGAAAAAACCAACTGCTATGAGCTT | |
| | | CTGGAAACCTCCGGTACACAATGTCACGGGGATCCAACGCATGT | |
| | | GGTATGAGTCCTTTCACCGTGGCCACGCTTCTTTTTGTGGTTGTG | |
| | | GGAATCCTATACTTCACATTACTGCACTTGCTGAAACATATGGCC | |
| | | ATCCAACAGGCCCGAGACCTTCTGGGCCACCGGGAGTAGACCC | |
| | | CAACCCCCACATCCGTAGAGCCAGGCCTGCCCCGGCCGCTCCG | |
| | | GGGCCCTCACAGGTTGATTCGAGACCAGCCCTGACATGGCATG | |
| | | GGGATGGTGGAAGCGACGGAGGCGCTGGTGGTTCCGGAAGCG | |
| | | GTGGACCCGTGGCAGACTTCGCAGACGATGGCCTCGATCAGCT | |
| | | CGTCGCCGCCCTAGACGACGAAGAGTAA | |
| CAF05781.1 | AJ620230.1 | ATGGCATGGGGATGGTGGAAGCGACGGAGGCGCTGGTGGTTCC | 146 |
| | | GGAAGCGGTGGACCCGTGGCAGACTTCGCAGACGATGGCCTCG | |
| | | ATCAGCTCGTCGCCGCCCTAGACGACGAAGAGTAAGGAGGCGC | |
| | | AGACGGTGGAGGAGGGGGAGACGAAAAACAGGGACTTACAGAC | |
| | | GCAGGAGACGCTTTAGACGCAGGAGACGAAAAGCAAAACTTATA | |
| | | ATAAAACTGTGGCAACCTGCAGTAATTAAAAGATGCAGAATAAAG | |
| | | GGATACATACCACTGATTATAAGTGGGAACGGTACCTTTGCCAC | |
| | | AAACTTTACCAGTCACATAAATGACAGAATAATGAAAGGCCCCTT | |
| | | CGGGGGAGGACACAGCACTATGAGGTTCAGCCTCTACATTTTGT | |
| | | TTGAGGAGCACCTCAGACACATGAACTTCTAG | |
| CAF05782.1 | AJ620230.1 | ATGGCAGTTGAGGCTGACTTGCGGTTTCCGTTCTGCTCACCACA | 147 |
| | | AACTGACAACACTTGCATCAGCTTCCAGGTCCTTAGTTCCGTTTA | |
| | | CAACAACTACCTCAGTATTAATACCTTTAATAATGACAACTCAGAC | |
| | | TCAAAGTTAAAAGAATTTTTAAATAAAGCATTTCCGACAACAGGC | |
| | | ACAAAAGGAACAAGTTTAAATGCACTAAATACATTTAGAACAGAA | |
| | | GGATGCATAAGTCACCCACAACTAAAAAAACCAAACCCACAAATA | |
| | | AACAAACCATTAGAGTCACAATACTTTGCACCTTTAGATGCCCTC | |
| | | TGGGGAGACCCCATATACTATAATGATCTAAATGAAAACAAAAGT | |
| | | TTGAACGATATCATTGAGAAAATACTAATAAAAAACATGATTACAT | |
| | | ACCATGCAAAACTAAGAGAATTTCCAAATTCATACCAAGGAAACA | |
| | | AGGCCTTTTGCCACCTAACAGGCATATACAGCCCACCATACCTA | |
| | | AACCAAGGCAGAATATCTCCAGAAATATTTGGACTGTACACAGAA | |
| | | ATAATTTACAACCCTTACACAGACAAAGGAACTGGAAACAAAGTA | |
| | | TGGATGGACCCACTAACTAAAGAGAACAACATATATAAAGAAGGA | |
| | | CAGAGCAAATGCCTACTGACTGACATGCCCCTATGGACTTTACTT | |
| | | TTTGGATATACAGACTGGTGTAAAAAGGACACTAATAACTGGGAC | |
| | | TTACCACTAAACTACAGACTAGTACTAATATGCCCTTATACCTTTC | |
| | | CAAAATTGTACAATGAAAAGGTAAAAGACTATGGGTACATCCCGT | |
| | | ACTCCTACAAATTCGGAGCGGGTCAGATGCCAGACGGCAGCAA | |
| | | CTACATACCCTTTCAGTTTAGAGCAAAGTGGTACCCCACAGTACT | |
| | | ACACCAGCAACAGGTAATGGAGGACATAAGCAGGAGCGGGCCC | |
| | | TTTGCACCTAAGGTAGAAAAACCAAGCACTCAGCTGGTAATGAA | |
| | | GTACTGTTTTAACTTTAACTGGGGCGGTAACCCTATCATTGAACA | |
| | | GATTGTTAAAGACCCCAGCTTCCAGCCCACCTATGAAATACCCG | |
| | | GTACCGGTAACATCCCTAGAAGAATACAAGTCATCGACCCGCGG | |
| | | GTCCTGGGACCGCACTACTCGTTCCGGTCATGGGACATGCGCA | |
| | | GACACACATTTAGCAGAGCAAGTATTAAGAGAGTGTCAGAACAA | |
| | | CAAGAAACTTCTGACCTTGTATTCTCAGGCCCAAAAAAGCCTCG | |
| | | GGTCGACATCCCAAAACAAGAAACCCAAGAAGAAAGCTCACATT | |
| | | CACTCCAAAGAGAATCGAGACCGTGGGAGACCGAGGAAGAAAG | |
| | | CGAGACAGAAGCCCTCTCGCAAGAGAGCCAAGAGGTCCCCTTC | |
| | | CAACAGCAGTTGCAGCAGCAGTACCAAGAGCAGCTCAAGCTCAG | |
| | | ACAGGGAATCAAAGTCCTCTTCGAGCAGCTCATAAGGACCCAAC | |
| | | AAGGGGTCCATGTAAACCCATGCCTACAGTAG | |
| CAF05749.1 | AJ620231.1 | ATGCACTTTTCTCGAATAAGCAGAAAGAAAAGGAAAGTGCTACTG | 148 |
| | | CTTTGCGTGCCAGCAGCTAAGAAAAAACCAACTGCTATGAGCTT | |
| | | CTGGAAACCTCCGGTACACAATGTCACGGGGATCCAACGCATGT | |
| | | GGTATGAGTCCTTTCACCGTGGCCACGCTTCTTTTTGTGGTTGTG | |
| | | GGAATCCTATACTTCACATTACTGCACTTGCTGAAACATATGGCC | |
| | | ATCCAACAGGCCCGAGACCTTCTGGGCCACCGGGAGTAGACCC | |
| | | CAACCCCCACATCCGTAGAGCCAGGCCTGCCCCGGCCGCTCCG | |
| | | GAGCCCTCACAGGTTGATTCGAGACCAGCCCTGACATGGCATG | |
| | | GGGATGGTGGAAGCGACGGAGGCGCTGGTGGTTCCGGAAGCG | |
| | | GTGGACCCGTGGCAGACTTCGCAGACGATGGCCTCGATCAGCT | |
| | | CGTCGCCGCCCTAGACGACGAAGAGTAA | |
| CAF05750.1 | AJ620231.1 | ATGGCATGGGGATGGTGGAAGCGACGGAGGCGCTGGTGGTTCC | 149 |
| | | GGAAGCGGTGGACCCGTGGCAGACTTCGCAGACGATGGCCTCG | |
| | | ATCAGCTCGTCGCCGCCCTAGACGACGAAGAGTAAGGAGGCGC | |
| | | AGACGGTGGAGGAGGGGGAGACGAAAAACAAGGACTTACAGAC | |
| | | GCAGGAGACGCTTTAGACGCAGGGGACGAAAAGCAAAACTTATA | |
| | | ATAAAACTGTGGCAACCTGCAGTAATTAAAAGATGCAGAATAAAG | |
| | | GGATACATACCACTGATTATAAGTGGGAACGGTACCTTTGCCAC | |
| | | AAACTTTACCAGTCACATAAATGACAGAATAATGAAAGGCCCCTT | |
| | | CGGGGGAGGACACAGCACTATGAGGTTCAGCCTCTACATTTTGT | |
| | | TTGAGGAGCACCTCAGACACATGAACTTCTGGACCAGAAGCAAC | |
| | | GATAACCTAGAGCTAACCAGATACTTGGGGGCTTCAGTAAAAATA | |
| | | TACAGGCACCCAGACCAAGACTTTATAGTAATATACAACAGAAGA | |
| | | ACCCCTCTAGGAGGCAACATCTACACAGCACCCTCTCTACACCC | |
| | | AGGCAATGCCATTTTAGCAAAACACAAAATATTAGTACCAAGTTT | |
| | | ACAGACAAGACCAAAGGGTAGAAAAGCAATTAGACTAAGAATAG | |
| | | CACCCCCCACACTCTTTACAGACAAGTGGTACTTTCAAAAGGACA | |
| | | TAGCCGACCTCACCCTTTTCAACATCATGGCAGTTGAGGCTGAC | |
| | | TTGCGGTTTCCGTTCTGCTCACCACAAACTGACAACACTTGCATC | |
| | | AGCTTCCAGGTCCTTAGTTCCGTTTACAACAACTACCTCAGTATT | |
| | | AATACCTTTAATAATGACAACTCAGACTCAAAGTTAAAAGAATTTT | |
| | | TAAATAAAGCATTTCCAACAACAGGCACAAAAGGAACAAGTTTAA | |
| | | ATGCACTAAATACATTTAGAACAGAAGGATGCATAAGTCACCCAC | |
| | | AACTAAAAAAACCAAACCCACAAATAAACAAACCATTAGAGTCAC | |
| | | AATACTTTGCACCTTTAGATGCCCTCTGGGGAGACCCCATATACT | |
| | | ATAATGATCTAAATGAAAACAAAAGTTTGAACGATATCATTGAGAA | |
| | | AATACTAATAAAAAACATGATTACATACCATGCAAAACTAAGAGAA | |
| | | TTTCCAAATTCATACCAAGGAAACAAGGCCTTTTGCCACCTAACA | |
| | | GGCATATACAGCCCACCATACCTAAACCAAGGCAGAATATCTCC | |
| | | AGAAATATTTGGACTGTACACAGAAATAATTTACAACCCTTACAC | |
| | | AGACAAAGGAACTGGAAACAAAGTATGGATGGACCCACTAACTA | |
| | | AAGAGAACAACATATATAAAGAAGGACAGAGCAAATGCCTACTG | |
| | | ACTGACATGCCCCTATGGACTTTACTTTTTGGATATACAGACTGG | |
| | | TGTAAAAAGGACACTAATAACTGGGACTTACCACTAAACTACAGA | |
| | | CTAGTACTAATATGCCCTTATACCTTTCCAAAATTGTACAATGAAA | |
| | | AAGTAAAAGACTATGGGTACATCCCGTACTCCTACAAATTCGGAG | |
| | | CGGGTCAGATGCCAGACGGCAGCAACTACATACCCTTTCAGTTT | |
| | | AGAGCAAAGTGGTACCCCACAGTACTACACCAGCAACAGGTAAT | |
| | | GGAGGACATAAGCAGGAGCGGGCCCTTTGCACCTAAGGTAGAA | |
| | | AAACCAAGCACTCAGCTGGTAATGAAGTACTGTTTTAACTTTAAC | |
| | | TGGGGCGGTAACCCTATCATTGAACAGATTGTTAAAGACCCCAG | |
| | | CTTCCAGCCCACCTATGAAATACCCGGTACCGGTAACATCCCTA | |
| | | GAAGAATACAAGTCATCGACCCGCGGGTCCTGGGACCGCACTA | |
| | | CTCGTTCCGGTCATGGGACATGCGCAGACACACATTTAGCAGAG | |
| | | CAAGTATTAAGAGAGTGTCAGAACAACAAGAAACTTCTGACCTTG | |
| | | TATTCTCAGGCCCAAAAAAGCCTCGGGTCGACATCCCAAAACAA | |
| | | GAAACCCAAGAAGAAAGCTCACATTCACTCCAAAGAGAATCGAG | |
| | | ACCGTGGGAGACCGAGGAAGAAAGCGAGACAGAAGCCCTCTCG | |
| | | CAAGAGAGCCAAGAGGTCCCCTTCCAACAGCAGTTGCAGCAGC | |
| | | AGTACCAAGAGCAGCTCAAGCTCAGACAGGGAATCAAAGTCCTC | |
| | | TTCGAGCAGCTCATAAGGACCCAACAAGGGGTCCATGTAAACCC | |
| | | ATGCCTACGGTAG | |
| CAF05751.1 | AJ620232.1 | ATGCACTTTTCTCGAATAAGCAGAAAGAAAAGGAAAGTGCTACTG | 150 |
| | | CTTTGCGTGCCAGCAGCTAAGAAAAAACCAACTGCTATGAGCTT | |
| | | CTGGAAACCTCCGGTACACAATGTCACGGGGATCCAACGCATGT | |
| | | GGTATGAGTCCTTTCACCGTGGCCACGCTTCTTTTTGTGGTTGTG | |
| | | GGAATCCTATACTTCACATTACTGCACTTGCTGAAACATATGGCC | |
| | | ATCCAACAGGCCCGAGACCTTCTGGGCCACCGGGAGTAGACCC | |
| | | CAACCCCCACATCCGTAGAGCCAGGCCTGCCCCGGCCGCTCCG | |
| | | GAGCCCTCACAGGTTGATTCGAGACCAGCCCTGACGTGGCATG | |
| | | GGGATGGTGGAAGCGACGGAGGCGCTGGTGGTTCCGGAAGCG | |
| | | GTGGACCCGTGGCAGACTTCGCAGACGATGGCCTCGATCAGCT | |
| | | CGTCGCCGCCCTAGACGACGAAGAGTAA | |
| CAF05752.1 | AJ620232.1 | ATGAAAGGCCCCTTCGGGGGAGGACACAGCACTATGAGGTTCA | 151 |
| | | GCCTCTACATTTTGTTTGAGGAGCGCCTCAGACACATGAACTTCT | |
| | | GGACCAGAAGCAACGATAACCTAGAGCTAACCAGATACTTGGGG | |
| | | GCTTCAGTAAAAATATACAGGCACCCAGACCAAGACTTTATAGTA | |
| | | ATATACAACAGAAGAACCCCTCTAGGAGGCAACATCTACACAGC | |
| | | ACCCTCTCTACACCCAGGCAATGCCATTTTAGCAAAACACAAAAT | |
| | | ATTAGTACCAAGTTTACAGACAAGACCAAAGGGTAGAAAAGCAAT | |
| | | TAGACTAAGAATAGCACCCCCCACACTCTTTACAGACAAGTGGTA | |
| | | CTTTCAAAAGGACATAGCCGACCTCACCCTTTTCAACATCATGGC | |
| | | AGTTGAGGCTGACTTGCGGTTTCCGTTCTGCTCACCACAAACTG | |
| | | GCAACACTTGCATCAGCTTCCAGGTCCTTAATTCCGTTTACAACA | |
| | | ACTACCTCAGTATTAATACCTTTAATAATGACAACTCAGACTCAAA | |
| | | GTTAAAAGAATTTTTAAATAAAGCATTTCCAACAACAGGCACAAAA | |
| | | GGAACAAGTTTAAATGCACTAAATACATTTAGAACAGAAGGATGC | |
| | | ATAAGTCACCCACAACTAAAAAAACCAAACCCACAAATAAACAAA | |
| | | CCATTAGATTCACAATACTTTGCACCTTTAGACGCCCTCTGGGGA | |
| | | GACCCCATATACTATAATGATCTAAATGAAAAGAAAAGTTTGAAG | |
| | | GATATCATTGAGAACATACTAATAAAAAACATGATTACATACCATG | |
| | | AAAAACTAAGAGAGTTTCCAAATTCATACCAAGGAAACAAGGCCT | |
| | | TTTGCCACCTAACAGGCATATACAGCCCACCATACCTAAACCAAG | |
| | | GCAGAATATCTCCAGAAATATTTGGACTGTACACAGAAATAATTT | |
| | | ACAACCCTTACACAGACAAAGGAACTGGAAACAAAGTATGGATG | |
| | | GACCCACTAACTAAAGAGAACAACATATATAAAGAAGGACAGAG | |
| | | CAAATGCCTACTGACTGACATGCCCCTATGGACTTTACTTTTTGG | |
| | | ATATACAGACTGGTGTAAAAAGGACACTAATAACTGGGACTTACC | |
| | | ACTAAACTACAGACTAGTACTAATATGCCCTTATACCTTTCCAAAA | |
| | | TTGTACAATGAAAAGGTAAAAGACTATGGGTACATCCCGTACTCC | |
| | | TACAAATTCGGAGCGGGTCAGATGCCAGACGGCAGCAACTACAT | |
| | | ACCCTTTCAGTTTAGAGCAAAGTGGTACCCCACAGTACTACACCA | |
| | | GCAACAGGTAATGGAGGACATAAGCAGGAGCGGGCCCTTTGCA | |
| | | CCTAAGGTAGAAAAACCAGGCACTCAGCTGGTAATGAAGTACTG | |
| | | TTTTAACTTTAACTGGGGCGGTAACCCTATCATTGAACAGATTGT | |
| | | TAAAGACCCCAGCTTCCAGCCCACCTATGAAATACCCGGTACCG | |
| | | GTGACATCCCTAGAAGAATACAAGTCATCGACCCGCGGGTCCTG | |
| | | GGACCGCACTACTCGTTCCGGTCATGGGACACGCGCAGACACA | |
| | | CATTTAGCAGAGCAAGTATTAAGAGAGTGTCAGAACAACAAGAA | |
| | | GCTTCTGACCTTGTATTCTCAGGCCCAAAAAAGCCTCGGGTCGA | |
| | | CATCCCAAAACAAGAAACCCAAGAAGAAAGCTCACATTCACTCCA | |
| | | AAGAGAATCGAGACCGTGGGAGACCGAGGAAGAAAGCGAGACA | |
| | | GAAGCCCTCTCGCAAGAGAGCCAAGAGGTCCCCTTCCAACAGC | |
| | | AGTTGCAGCAGCAGTACCAAGAGCAGCTCAAGCTCAGACAGGG | |
| | | AATCAAAGTCCTCTTCGAGCAGCTCATAAGGACCCAACAAGGGG | |
| | | TCCATGTAAACCCATGCCTACAGTAG | |
| CAF05753.1 | AJ620233.1 | ATGCACTTTTCTCGAATAAGCAGAAAGAAAAGGAAAGTGCTACTG | 152 |
| | | CTTTGCGTGCCAGCAGCTAAGAAAAAACCAACTGCTATGAGCTT | |
| | | CTGGAAACCTCCGGTACACAATGTCACGGGGATCCAACGCATGT | |
| | | GGTATGAGTCCTTTCACCGTGGCCACGCTTCTTTTTGTGGTTGTG | |
| | | GGAATCCTATACTTCACATTACTGCACTTGCTGAAACATATGGCC | |
| | | GTCCAACAGGCCCGAGACCTTCTGGGCCACCGGGAGTAGACCC | |
| | | CAACCCCCACATCCGTAGAGCCAGGCCTGCCCCGGCCGCTCCG | |
| | | GAGCCCTCACAGGTTGATTCGAGACCAGCCCTGACATGGCATG | |
| | | GGGATGGTGGAAGCGACGGAGGCGCTGGTGGTTCCGGAAGCG | |
| | | GTGGACCCGTGGCAGACTTCGCAGACGATGGCCTCGATCAGCT | |
| | | CGTCGCCGCCCTAGACGACGAAGAGTAA | |
| CAF05754.1 | AJ620233.1 | ATGGCATGGGGATGGTGGAAGCGACGGAGGCGCTGGTGGTTCC | 153 |
| | | GGAAGCGGTGGACCCGTGGCAGACTTCGCAGACGATGGCCTCG | |
| | | ATCAGCTCGTCGCCGCCCTAGACGACGAAGAGTAAGGGGGCGC | |
| | | AGACGGTGGAGGAGGGGGAGACGAAAAACAAGGACTTACAGAC | |
| | | GCAGGAGACGCTTTAGACGCAGGAGACGAAAAGCAAAACTTATA | |
| | | GTAAAACTGTGGCAACCTGCAGTAATTAAAAGATGCAGAATAAAG | |
| | | GGATACATACCACTGATTATAGGTGGGAACGGTACCTTTGCCAC | |
| | | AAACTTTACCAGTCACATAAATGACAGAATAATGAAAGGCCCCTT | |
| | | CGGGGGAGGACACAGCACTATGAGGTTCAGCCTCTACATTTTGT | |
| | | TTGAGGAGCACCTCAGACACATGAACTTCTGGACCAGAAGCAAC | |
| | | GATAACCTAGAGCTAACCAGATACTTGGGGGCTTCAGTAAAAATA | |
| | | TACAGGCACCCAGACCAAGACTTTATAGTAATATACAACAGAAGA | |
| | | ACCCCTCTAGGAGGCAACATCTACACAGCACCCTCTCTACACCC | |
| | | AGGCAATGCCATTTTAGCAAAACACAAAATATTAGTACCAAGTTT | |
| | | ACAGACAAGACCAAAGGGTAGAAAAGCAATTAGACTAAGAATAG | |
| | | CACCCCCCACACTCTTTACAGACAAGTGGTACTTTCAAAAGGACA | |
| | | TAGCCGACCTCACCCTTTTCAACATCATGGCAGTTGAGGCTGAC | |
| | | TTGCGGTTTCCGTTCTGCTCACCACAAACTGACAACACTTGCATC | |
| | | AGCTTCCAGGTCCTTAGTTCCGTTTACAACAACTACCTCAGTATT | |
| | | AATACCTTTAATAATGACAACTCAGACTCAAAGTTAAAAGAATTTT | |
| | | TAAATAAAGCATTTCCAACAACAGGCACAAAAGGAACAAGTTTAA | |
| | | ATGCACTAAATACATTTAGAACAGAAGGATGCATAAGTCACCCAC | |
| | | AACTAAAAAAACCAAACCCACAAATAAACAAACCATTAGAGTCAC | |
| | | AATACTTTGCACCTTTAGATGCCCTCTGGGGAGACCCCATATACT | |
| | | ATAATGATCTAAATGAAAACAAAAGTTTGAACGATATCATTGAGAA | |
| | | AATACTAATAAAAAACATGATTACATACCATGCAAAACTAAGAGAA | |
| | | TTTCCAAATTCATACCAAGGAAACAAGGCCTTTTGCCACCTAACA | |
| | | GGCATATACAGCCCACCATACCTAAACCAAGGCAGAATATCTCC | |
| | | AGAAATATTTGGACTGTACACAGAAATAATTTACAACCCTTACAC | |
| | | AGACAAAGGAACTGGAAACAAAGTATGGATGGACCCACTAACTA | |
| | | AAGAGAACAACATATATAAAGAAGGACAGAGCAAATGCCTACTG | |
| | | ACTGACATGCCCCTATGGACTTTACTTTTTGGATATACAGACTGG | |
| | | TGTAAAAAGGACACTAATAACTGGGACTTACCACTAAACTACAGA | |
| | | CTAGTACTAATATGCCCTTATACCTTTCCAAAATTGTACAATGAAA | |
| | | AGGTAAAAGACTATGGGTACATCCCGTACTCCTACAAATTCGGA | |
| | | GCGGGTCAGATGCCAGACGGCAGCAACTACATACCCTTTCAGTT | |
| | | TAGAGCAAAGTGGTACCCCACAGTACTACACCAGCAACAGGTAA | |
| | | TGGAGGACATAAGCAGGAGCGGGCCCTTTGTACCTAAGGTAGAA | |
| | | AAACCAAGCACTCAGCTGGTAATGAAGTACTGTTTTAACTTTAAC | |
| | | TGGGGCGGTAACCCTATCATTGAACAGATTGTTAAAGACCCCAG | |
| | | CTTCCAGCCCACCTATGAAATACCCGGTACCGGTAACATCCCTA | |
| | | GAAGAATACAAGTCATCGACCCGCGGGTCCTGGGACCGCACTA | |
| | | CTCGTTCCGGCCATGGGACATGCGCAGACACACATTTAGCAGAG | |
| | | CAAGTATTAAGAGAGTGTCAGAACAACAAGAAACTTCTGACCTTG | |
| | | TATTCTCAGGCCCAAAAAAGCCTCGGGTCGACATCCCAAAACAA | |
| | | GAAACCCAAGAAGAAAGCTCACATTCACTCCAAAGAGAATCGAG | |
| | | ACCGTGGGAGACCGAGGAAGAAAGCGAGACAGAAGCCCTCTCG | |
| | | CAAGAGAGCCAAGAGGTCCCCTTCCAACAGCAGTTGCAGCAGC | |
| | | AGTACCAAGAACAGCTCAAGCTCAGACAGGGAATCAAAGTCCTC | |
| | | TTCGAGCAGCTCATAAGGACCCAACAAGGGGTCCATGTAAACCC | |
| | | ATGCCTACAGTAG | |
| CAF05755.1 | AJ620234.1 | ATGCACTTTTCTCGAATAAGCAGAAAGAAAAGGAAAGTGCTACTG | 154 |
| | | CTTTGCGTGCCAGCAGCTAAGAAAAAACCAACTGCTATGAGCTT | |
| | | CTGGAAACCTCCGGTACACAATGTCACGGGGATCCAACGCATGT | |
| | | GGTATGGGTCCTTTCACCGTGGCCACGCTTCTTTTTGTGGTTGT | |
| | | GGGAATCCTATACTTCACATTACTGCACTTGCTGAAACATATGGC | |
| | | CATCCAACAGGCCCGAGACCTTCTGGGCCACCGGGAGTAGACC | |
| | | CCAACCCCCACATCCGTAGAGCCAGGCCTGCCCCGGCCGCTCC | |
| | | GGAGCCCTCACAGGTTGATTCGAGACCAGCCCTGACATGGCAT | |
| | | GGGGATGGTGGAAGCGACGGAGGCGCTGGTGGTCCCGGAAGC | |
| | | GGTGGACCCGTGGCAGACTTCGCAGACGATGGCCTCGATCAGC | |
| | | TCGTCGCCGCCCTAGACGACGAAGAGTAA | |
| CAF05756.1 | AJ620234.1 | ATGGCATGGGGATGGTGGAAGCGACGGAGGCGCTGGTGGTCC | 155 |
| | | CGGAAGCGGTGGACCCGTGGCAGACTTCGCAGACGATGGCCTC | |
| | | GATCAGCTCGTCGCCGCCCTAGACGACGAAGAGTAAGGAGGCG | |
| | | CAGACGGTGGAGGAGGGGGAGACGAAAAACAAGGACTTACAGA | |
| | | CGCAGGAGACGCTTTAGACGCAGGAGACGAAAAGCAAAACTTAT | |
| | | AATAAAACTGTGA | |
| CAF05757.1 | AJ620234.1 | ATGAAAGGCCCCTTCGGGGGAGGACACAGCACTATGAGGTTCA | 156 |
| | | GCCTCTACATTTTGTTTGAGGAGCACCTCAGACACATGAACTTCT | |
| | | GGACCAGAAGCAACGATAACCTAGAGCTAACCAGATACTTGGGG | |
| | | GCTTCAGTAAAAATATACAGGCACCCAGACCAAGACTTTATAGTA | |
| | | ATATACAACAGAAGAACCCCTCTAGGAGGCAACATCTACACAGC | |
| | | ACCCTCTCTACACCCAGGCAATGCCATTTTAGCAAAACACAAAAT | |
| | | ATTAGTACCAAGTTTACAGACAAGACCAAAGGGTAGAAAAGCAAT | |
| | | TAGACTAAGAATAGCACCCCCCACACTCTTTACAGACAAGTAG | |
| CAF05758.1 | | ATGGCAGTTGAGGCTGACTTGCGGTTTCCGTTCTGCTCACCACA | 157 |
| | | AACTGACAACACTTGCATCAGCTTCCAGGTCCTTAGTTCCGTTTA | |
| | | CAACAACTACCTCAGTATTAATACCTTTAATAATGACAACTCAGAC | |
| | | TCAAAGTTAAAAGAATTTTTAAATAAAGCATTTCCAACAACAGGCA | |
| | | CAAAAGGAACAAGTTTAAATGCACTAAATACATTTAGAACAGAAG | |
| | | GATGCATAAGTCACCCACAACTAAAAAAACCAAACCCACAAACAA | |
| | | ACAAACCATCAGAGTCACAATACTTTGCACCTTTAGATGCCCTCT | |
| | | GGGGAGACCCCATATACTATAATGATCTAAATGAAAAGAAAAGTT | |
| | | TCAAGAATATCATTGAGAACATACTAATAAAAAACATGATTACATA | |
| | | CCATGAAAAACTAACAGAATTTCCAAATTCATACCAAGGAAACAA | |
| | | GGCCTTTTGCCACCTAACAGGCATATACAGCCCACCATACCTAA | |
| | | ACCAAGGCAGAATATCTCCAGAAATATTTGGACTGTACACAGAAA | |
| | | TAATTTACAACCCTTACACAGACAAAGGAACTGGAAACAAAGTAT | |
| | | GGATGGACCCACTAACTAAAGAGAACAACATATATAAAGAAGGA | |
| | | CAGAGCAAATGCCTACTGACTGACATGCCCCTATGGACTTTACTT | |
| | | TTTGGATATACAGACTGGTGTAAAAAGGACACTAATAACTGGGAC | |
| | | TTACCACTAAACTACAGACTAGTACTAATATGCCCTTATACCTTTC | |
| | | CAAAATTGTACAATGAAAAGGTAAAAGACTATGGGTACATCCCGT | |
| | | ACTCCTACAAATTCGGAGCGGGTCAGATGCCAGACGGCAGCAA | |
| | | CTACATACCCTTTCAGTTTAGAGCAAAGTGGTACCCCACAGTACT | |
| | | ACACCAGCAACAGGTAATGGAGGACATAAGCAGGAGCGGGCCC | |
| | | TTTGCACCTAAGGTAGAAAAACCAAGCACTCAGCTGGTAATGAA | |
| | | GTACTGTTTTAACTTTAACTGGGGCGGTAACCCTATCATTGAACA | |
| | | GATTGTTAAAGACCCCAGCTTCCAGCCCACCTATGAAATACCCG | |
| | | GTACCGGTAACATCCCTAGAAGAATACAAGTCATCGACCCGCGG | |
| | | GTCCTGGGACCGCACTACTCGTTCCGGTCATGGGACATGCGCA | |
| | | GACACACATTTAGCAGAGCAAGTATTAAGAGAGTGTCAGAACAA | |
| | | CAAGAAACTTCTGACCTTGTATTCTCAGGCCCAAAAAAGCCTCG | |
| | | GGTCGACATCCCAAAACAAGAAACCCAAGAAGAAAGCTCACATT | |
| | | CACTCCAAAGAGAATCGAGACCGTGGGAGACCGAGGAAGAAAG | |
| | | CGAGACAGAAGCCCTCTCGCAAGAGAGCCAAGAGGTCCCCTTC | |
| | | CAACAGCAGTTGCAGCAGCAGTACCAAGAGCAGCTCAAGCTCAG | |
| | | ACAGGGAATCAAAGTCCTCTTCGAGCAGCTCATAAGGACCCAAC | |
| | | AAGGGGTCCATGTAAACCCATGCCTACAGTAG | |
| CAF05759.1 | | ATGCACTTTTCTCGAATAAGCAGAAAGAAAAGGAAAGTGCTACTG | 158 |
| | | CTTTGCGTGCCAGCAGCTAAGAAAAAACCAACTGCTATGAGCTT | |
| | | CTGGAAACCTCCGGTACACAATGTCACGGGGATCCAACGCATGT | |
| | | GGTATGAGTCCTTTCACCGTGGCCACGCTTCTTTTTGTGATTGTG | |
| | | GGAATCCTATACTTCACATTACTGCACTTGCTGAAACATATGGCC | |
| | | ATCCAACAGGCCCGAGACCTTCTGGGCCACCGGGAGTAGACCC | |
| | | CAACCCCCACATCCGTAGAGCCAGGCCTGCCCCGGCCGCTCCG | |
| | | GAGCCCTCACAGGTTGATTCGAGACCAGCCCTGACATGGCATG | |
| | | GGGATGGTGGAAGCGACAGAGGCGCTGGTGGTTCCGGAAGCG | |
| | | GTGGACCCGTGGCAGACTTCGCAGACGATGGCCTCGATCAGCT | |
| | | CGTTGCCGCCCTAGACGACGAAGAGTAA | |
| CAF05760.1 | AJ620234.1 | ATGGCATGGGGATGGTGGAAGCGACAGAGGCGCTGGTGGTTCC | 159 |
| | | GGAAGCGGTGGACCCGTGGCAGACTTCGCAGACGATGGCCTCG | |
| | | ATCAGCTCGTTGCCGCCCTAGACGACGAAGAGTAAGGAGGCGC | |
| | | AGACGGTGGAGGAGGGGGAGACGAAAAACAAGGACTTACAGAC | |
| | | GCAGGAGACGCTTTAGACGCAGGAGACGAAAAGCAAAACTTATA | |
| | | ATAAAACTGTGGCAACCTGCAGTAATTAAAAGATGCAGAATAAAG | |
| | | GGATACATACCACTGATTATAAGTGGGAACGGTACCTTTGCCAC | |
| | | AAACTTTACCAGTCACATAAATGACAGAATAATGAAGGGCCCCTT | |
| | | CGGGGGAGGACACAGCACTATGAGGTTCAGTCTCTACATTTTGT | |
| | | TTGAGGAGCACCTCAGACACATGAACTTCTGGACCAGAAGCAAC | |
| | | GATAACCTAGAGCTAACCAGATACTTGGGGGCTTCAGTAAAAATA | |
| | | TACAGGCACCCAGACCAAGACTTTATAGTAATATACAACAGAAGA | |
| | | ACCCCTCTAGGAGGCAACATCTACACAGCACCCTCTCTACACCC | |
| | | AGGCAATGCCATTTTAGCAAAACACAAAATATTAGTACCAAGTTT | |
| | | ACAGACAAGACCAAAGGGTAGAAAAGCAATTAGACTAAGAATAG | |
| | | CACCCCCCACACTCTTTACAGACAAGTGGTACTTTCAAAAGGACA | |
| | | TAGCCGACCTCACCCTTTTCAACATCATGGCAGTTGAGGCTGAC | |
| | | TTGCGGTTTCCGTTCTGCTCACCACAAACTGACAACACTTGCATC | |
| | | AGCTTCCAGGTCCTTAGTTCCGTTTACAACAACTACCTCAGTATT | |
| | | AATACCTTTAATAATGACAACTCAGACTCAAAGTTAAAAGAATTTT | |
| | | TAAATAAAGCATTTCCAACAACAGGCACAAAAGGAACAAGTTTAA | |
| | | ATGCACTAAATACATTTAGAACAGAAGGATGCATAAGTCACCCAC | |
| | | AACTAAAAAAACCAAACCCACAAATAAACAAACCATTAGAGTCAC | |
| | | AATACTTTGCACCTTTAGATGCCCTCTGGGGAGACCCCATATACT | |
| | | ATAATGATCTAAATGAAAACAAAAGTTTGAACGATATCATTGAGAA | |
| | | AATACTAATAAAAAACATGATTACATACCATGCAAAACTAAGAGAA | |
| | | TTTCCAAATTCATACCAAGGAAACAAGGCCTTTTGCCACCTAACA | |
| | | GGCATATACAGCCCACCATACCTAAACCAAGGCAGAATATCTCC | |
| | | AGAAATATTTGGACTGTACACAGAAATAATTTACAACCCTTACAC | |
| | | AGACAAAGGAACTGGAAACAAAGTATGGATGGACCCACTAACTA | |
| | | AAGAGAACAACATATATAAAGAAGGACAGAGCAAATGCCTACTG | |
| | | ACTGACATGCCCCTATGGACTTTACTTTTTGGATATACAGACTGG | |
| | | TGTAAAAAGGACACTAATAACTGGGACTTACCACTAAACTACAGA | |
| | | CTAGTACTAATATGCCCTTATACCTTTCCAAAATTGTACAATGAAA | |
| | | AGGTAAAAGACTATGGGTACATCCCGTACTCCTACAAATTCGGA | |
| | | GCGGGTCAGATGCCAGACGGCAGCAACTACATACCCTTTCAGTT | |
| | | TAGAGCAAAGTGGTACCCCACAGTACTACACCAGCAACAGGTAA | |
| | | TGGAGGACATAAGCAGGAGCGGGCCCTTTGCACCTAAGGTAGA | |
| | | AAAACCAAGCACTCAGCTGGTAATGAAGTACTGTTTTAACTTTAA | |
| | | CTGGGGCGGTAACCCTATCATTGAACAGATTGTTAAAGACCCCA | |
| | | GCTTCCAGCCCACCTATGAAATACCCGGTACCGGTAACATCCCT | |
| | | AGAAGAATACAAGTCATCGACCCGCGGGTCCTGGGACCGCACT | |
| | | ACTCGTTCCGGTCATGGGACATGCGCAGACACACATTTAGCAGA | |
| | | GCAAGTATTAAGAGAGTGTCAGAACAACAAGAAACTTCTGACCTT | |
| | | GTATTCTCAGGCCCAAAAAAGCCTCGGGTCGACATCCCAAAACA | |
| | | AGAAACCCAAGAAGAAAGCTCACATTCACTCCAAAGAGAATCGA | |
| | | GACCGTGGGAGACCGAGGAAGAAAGCGAGACAGAAGCCCTCTC | |
| | | GCAAGAGAGCCAAGAGGTCCCCTTCCAACAGCAGTTGCAGCAG | |
| | | CAGTACCAAGAGCAGCTCAAGCTCAGACAGGGAATCAAAGTCCT | |
| | | CTTCGAGCAGCTCATAAGGACCCAACAAGGGGTCCATGTAAACC | |
| | | CATGCCTACAGTAG | |
| AAC28465.1 | AF079173.1 | ATGGCCTATGGCTGGTGGCGCCGAAGGAGAAGACGGTGGCGCA | 160 |
| | | GGTGGAGACCCAGACCATGGAGGCCCCGCTGGAGGACCCGAA | |
| | | GACGCAGACCTGCTAGACGCCGTGGCCACCGCAGAAACGTAAG | |
| | | AAGACGCCGCAGAGGAGGGAGGTGGAGGAGGAGATATAGGAG | |
| | | ATGGAAAAGAAAGGGCAGGCGCAGAAAAAAAGCTAAAATAATAA | |
| | | TAAGACAATGGCAACCAAACTACAGAAGGAGATGTAACATAGTA | |
| | | GGCTACATCCCTGTACTAATATGTGGCGAAAATACTGTCAGCAG | |
| | | AAACTATGCCACACACTCAGACGATACCAACTACCCAGGACCCT | |
| | | TTGGGGGGGGTATGACTACAGACAAATTTACTTTAAGAATTCTGT | |
| | | ATGACGAGTACAAAAGGTTTATGAACTACTGGACAGCATCTAACG | |
| | | AAGACCTAGACCTTTGTAGATATCTAGGAGTAAACCTGTACTTTT | |
| | | TCAGACACCCAGATGTAGATTTTATCATAAAAATTAATACCATGC | |
| | | CTCCTTTTCTAGACACAGAACTCACAGCCCCTAGACTACACCCA | |
| | | GGCATGCTAGCCCTAGACAAAAGAGCAAGATGGATACCTAGCTT | |
| | | AAAATCTATACCAGGAAAAAAACACTATATTAAAATAAGAGTAGG | |
| | | GGCACCAAAAATGTTCACTGATAAATGGTACCCCCAAACAGATCT | |
| | | TTGTGACATGGTGCTTCTAACTGTCTATGCAACCGCAGCGGATAT | |
| | | ACCATATCCGTTCGGCTCACCACTAACTGACTCTGTGGTTGTGAA | |
| | | CTTCCAGGTTCTGCAATCCATGTATGATAAATACATTAGCATATTA | |
| | | CCAGACCAAAAGTCACAAAGTAAGTCACTACTTAGTAACATAGCA | |
| | | AATTACATTCCCTTTTATAATACCACACAAACTATAGCCCAATTAA | |
| | | AGCCATTTATAGATGCAGGCAATATAACATCAGGCACAGCAGCA | |
| | | ACAACATGGGGATCATACATAAACACAACCAAATTTACTACAACA | |
| | | GCCACAACAACTTATACATATCCAGGCACTACAACTAACACAGTT | |
| | | ACTATGTATTCCTCTAATGACTCCTGGTACAGAGGAACAGTATAT | |
| | | AACAATCAAATTAAAGAGTTACCAAAAAAAGCAGCTGAATTATAC | |
| | | TCAAAAGCAACAAAAACCTTGCTAGGAAACACCTTCACAACTGAA | |
| | | GACTGCACACTAGAATACCATGGAGGACTATACAGCTCAATATG | |
| | | GCTATCCCCTGGTAGATCTTACTTTGAAACACCAGGAGCATACAC | |
| | | AGACATAAAGTACAATCCATTCACAGACAGAGGAGAAGGCAACA | |
| | | TGTTATGGATAGACTGGCTAAGCAAAAAAAACATGAACTATGACA | |
| | | AAGTACAAAGTAAATGCTTAGTATCAGACCTACCTCTATGGGCAT | |
| | | CAGCATATGGATATGTAGAATTTTGTGCAAAAAGTACAGGAGACC | |
| | | AGAACATACACATGAATGCCAGGCTACTAATAAGAAGTCCCTTTA | |
| | | CAGACCCACAGCTACTAGTACACACAGACCCCACAAAAGGCTTT | |
| | | GTTCCCTACTCTTTAAACTTTGGAAATGGTAAAATGCCAGGAGGT | |
| | | AGTAGTAATGTGCCTATTAGAATGAGAGCTAAATGGTATCCAACA | |
| | | TTGTTTCACCAACAAGAAGTACTAGAGGCCTTAGCACAGTCAGG | |
| | | CCCCTTTGCATACCACTCAGACATTAAAGAAGTATCTCTGGGTAT | |
| | | GAAATACCGTTTTAAGTGGATCTGGGGTGGAAACCCCGTTCGCC | |
| | | AACAGGTTGTTAGAAATCCCTGCAAAGAAACCCACTCCTCGGGC | |
| | | AATAGAGTCCCTAGAAGCTTACAAATCGTTGACCCGAAATACAAC | |
| | | TCACCGGAACTCACATTCCATACCTGGGACTTCAGACGTGGCCT | |
| | | CTTTGGCCCGAAAGCTATTCAGAGAATGCAACAACAACCAACAA | |
| | | CTACTGACATTTTTTCAGCAGGCCGCAAGAGACCCAGGAGGGAC | |
| | | ACCGAGGTGTACCACTCCAGCCAAGAAGGGGAGCAAAAAGAAA | |
| | | GCTTACTTTTCCCCCCAGTCAAGCTCCTCAGACGAGTCCCCCCG | |
| | | TGGGAAGACTCGCAGCAGGAGGAAAGCGGGTCGCAAAGCTCAG | |
| | | AGGAAGAGACGCAGACCGTCTCCCAGCAGCTCAAGCAGCAGCT | |
| | | GCAGCAACAGCAAATCCTGGGAGTCAAACTCAGACTCCTGTTCG | |
| | | ACCAAGTCCAAAAAATCCAACAAAATCAAGATATCAACCCTACCT | |
| | | TGTTACCAAGGGGGGGGGATCTAGCATCGTTATTTCAAATAGCA | |
| | | CCATAA | |
| AAD20024.1 | AF129887.1 | ATGGCCTATGGGTTGTGGAGGAGACGGCGAAGGAGGTGGAAGA | 161 |
| | | GGTGGAGACGCAGACGGTGGAGACGCCGCTGGAGGACCCGCC | |
| | | GACGCAGACCTGCTGGACGCCGTAGACGCCGCAGAACAGTAAG | |
| | | GAGACGGCGCAGGCGCGGGAGGTGGAGGAGGAGATATAGGAG | |
| | | ATGGAGGCGAAAAGGCAGACGCAGGAAAAAGAAAAAACTCATAA | |
| | | TAAGACAATGGCAGCCAAACTATACCAGAAAGTGCAACATTGTG | |
| | | GGTTATATGCCAGTTATAATGTGTGGCGAAAATACTGTCAGCAGA | |
| | | AACTATGCCACACACTCAGACGATACCAACTACCCAGGACCCTT | |
| | | TGGGGGGGGTATGACTACAGACAAATTTACTTTAAGAATTCTGTA | |
| | | TGACTGGTACAAAAGGTTTATGAACTACTGGACAGCATCTAACGA | |
| | | AGACCTAGACCTTTGTAGATATCTAGGAGTGAACCTGTACTTTTT | |
| | | CAGACACCCAGATGTAGATTTTATCATAAAAATTAATACCATGCC | |
| | | TCCTTTTCTAGACACAGAACTCACAGCCCCTAGCATACACCCAG | |
| | | GCATGCTAGCCCTAGACGAAAGAGCAAGATGGATACCTAGCTTA | |
| | | AAATCTAGACCAGGAAAAAAACACTATATTAAAATAAGAGTAGGG | |
| | | GCACCAAAAATGTTCACTGATAAATGGTACCCCCAAACAGATCTT | |
| | | TGTGACATGGTGCTTCTAACTGTCTATGCAACCGCAGCGGATAT | |
| | | GCAATATCCGTTCGGCTACCCACTAACTGACTCTGTGGTTGTGAA | |
| | | CTTCCAGGTTCTGCAATCCATGTATGATAAATACATTAGCATATTA | |
| | | CCAGACCAAAAGTCACAAAGAGAGTCACTACTTAGTAACATAGCA | |
| | | AATTACATTCCCTTTTATAATACCACACAAACTATAGCCCAATTAA | |
| | | AGCCATTTATAGATGCAGGCAATATAACATCAGGCACAACAGCAA | |
| | | CAACATGGGGATCATACATAAACACAACCAAATTTACTACAACAG | |
| | | CCACAACAACTTATACATATCCAGGCACTACAACTAACACAGTTA | |
| | | CTATGTTAACCTCTAATGACTCCTGGTACAGAGGAACAGTATATA | |
| | | ACAATCAAATTAAAGAGTTACCAAAAAAAGCAGCTGAATTATACT | |
| | | CAAAAGCAACAAAAACCTTGCTAGGAAACACCTTCACAACTGAAG | |
| | | ACTGCACACTAGAATACCATGGAGGACTATACAGCTCAATATGG | |
| | | CTATCCCCTGGTAGATCTTACTTTGAAACACCAGGAGCATACACA | |
| | | GACATGAAGTACAACCCATTCACAGACAGAGGAGAAGGCAACAT | |
| | | GTTATGGATAGACTGGCTAAGCAAAAAAAACATGAACTATGACAA | |
| | | AGTACAAAGTAAATGCTTAGTATCAGACCTACCTCTATGGGCAGC | |
| | | AGCATATGGTTATTTAGAATTCTGCTCTAAAAGCACAGGAGACAC | |
| | | AAACATACACATGAATGCCAGACTACTAATAAGAAGTCCTTTTAC | |
| | | AGACCCCCAGCTAATAGCACACACAGACCCCACTAAAGGCTTTG | |
| | | TACCCTATTCCTTAAACTTTGGAAATGGTAAAATGCCAGGAGGTA | |
| | | GCAGCAATGTTCCCATAAGAATGAGAGCTAAGTGGTACCCCACT | |
| | | TTATTCCACCAACAAGAAGTTCTAGAGGCCTTAGCACAGTCAGG | |
| | | ACCCTTTGCTTATCACTCAGACATTAAAAAAGTATCTCTAGGCAT | |
| | | AAAATACCGTTTTAAGTGGATCTGGGGTGGAAACCCCGTTCGCC | |
| | | AACAGGTTGTTAGAAACCCCTGCAAGGAACCCCACTCCTCGGTC | |
| | | AATAGAGTCCCTAGAAGCATACAAATCGTTGACCCGAAATACAAC | |
| | | TCACCGGAACTTACCATCCATGCCTGGGACTTCAGACGTGGCTT | |
| | | CTTTGGCCCGAAAGCTATTCAAAGAATGCAACAACAACCAACTG | |
| | | CTACTGAATTTTTTTCAGCAGGCCGCAAGAGACCCAGAAGGGAC | |
| | | ACAGAAGTGTATCAGTCCGACCAAGAAAAGGAGCAAAAAGAAAG | |
| | | CTCGCTTTTCCCCCCAGTCAAGCTCCTCCGAAGAGTCCCCCCAT | |
| | | GGGAGGACTCGGAACAGGAGCAAAGCGGGTCGCAAAGCTCAGA | |
| | | GGAAGAGACCCACACCGTCTCCCAGCAGCTCAAACAGCAGCTTC | |
| | | AGCAGCAGCGGATCCTCGGCGTCAAGCTCAGAGTCCTGTTCCAC | |
| | | CAAGTCCACAAAATCCAACAAAATCAACATATCAACCCTACCTTA | |
| | | TTGCCAAGGGGTGGGGCCCTAGCATCCTTGTCTCAGATTGCACC | |
| | | ATAA | |
| AAD29634.1 | AF116842.1 | ATGGCCTATGGCTTGTGGCACCGAAGGAGAAGACGGTGGCGCA | 162 |
| | | GGTGGAAACGCACACCATGGAAGCGCCGCTGGAGGACCCGAAG | |
| | | ACGCAGACCTGCTAGACGCCGTGGCCGCCGCAGAAACGTAAGG | |
| | | AGACGCCGCAGAGGAGGGAGGTGGAGGAGGAGATATAGGAGAT | |
| | | GGAAAAGAAAGGGCAGGCGCAGAAAAAAAGCTAAAATAATAATA | |
| | | AGACAATGGCAACCAAACTACAGAAGGAGATGTAACATAGTAGG | |
| | | CTACATCCCTGTACTAATATGTGGCGAAAATACTGTCAGCAGAAA | |
| | | TTATGCCACACACTCAGACGATACCAACTACCCAGGACCCTTTG | |
| | | GGGGGGGTATGACTACAGACAAATTTACTTTAAGAATTCTGTGTG | |
| | | ACGAGTACAAAAGGTTTATGAACTACTGGACAGCATCTAACGAA | |
| | | GACCTAGACCTTTGTAGATATCTAGGAGTAAACCTGTACTTTTTC | |
| | | AGACACCCAGATGTAGATTTTATCATAAAAATTAATACCATGCCT | |
| | | CCTTTTCTAGACACAGAACTCACAGCCCCTAGCATACACCCAGG | |
| | | CATGCTAGCCCTAGACAAAAGAGCAAGATGGATACCTAGCTTAA | |
| | | AATCTAGACCAGGAAAAAAACACTATATTAAAATAAGAGTAGGGG | |
| | | CACCAAAAATGTTCACTGATAAATGGTACCCCCAAACAGATCTCT | |
| | | GTGACATGGTGCTTCTAACTGTCTATGCAACCACAGCGGATATG | |
| | | CAATATCCGTTCGGCTCACCACTAACTGACTCTGTGGTTGTGAAC | |
| | | TTCCAGGTTCTGCAATCCATGTATGATAAAACAATTAGCATATTAC | |
| | | CAGACGAAAAATCACAAAGAGAAATTCTACTTAACAAGATAGCAA | |
| | | GTTACATTCCCTTTTATAATACCACACAAACTATAGCCCAATTAAA | |
| | | GCCATTTATAGATGCAGGCAATGTAACATCAGGCGCAACAGCAA | |
| | | CAACATGGGCATCATACATAAACACAACCAAATTTACTACAGCAA | |
| | | CCACAACAACTTATGCATATCCAGGCACCAACAGACCCCCAGTA | |
| | | ACTATGTTAACCTGTAATGACTCCTGGTACAGAGGAACAGTATAT | |
| | | AACACACAAATTCAACAGTTACCAATAAAAGCAGCTAAATTATACT | |
| | | TAGAGGCAACAAAAACCTTGCTAGGAAACAACTTCACAAATGAG | |
| | | GACTACACACTAGAATATCATGGAGGACTGTACAGCTCAATATG | |
| | | GCTATCCCCTGGTAGATCTTACTTTGAAACAACAGGAGCATACAC | |
| | | AGACATAAAGTACAATCCATTCACAGACAGAGGAGAAGGCAACA | |
| | | TGTTATGGATAGACTGGCTAAGCAAAAAAAACATGAACTATGACA | |
| | | AAGTACAAAGTAAATGCTTAGTACGAGACCTACCTCTATGGGCA | |
| | | GCAGCATATGGATATGTAGAATTCTGTGCAAAAAGTACAGGAGA | |
| | | CAAGAACATATACATGAATGCCAGGCTACTAATAAGAAGTCCCTT | |
| | | TACAGACCCACAACTACTAGTACACACAGACCCCACAAAAGGCT | |
| | | TTGTTCCTTACTCTTTAAACTTTGGAAATGGTAAAATGCCAGGAG | |
| | | GTAGTAGTAATGTGCCTATTAGAATGAGAGCTAAATGGTATCCAA | |
| | | CATTATTTCACCAGCAAGAAGTACTAGAGGCCTTAGCACAGTCA | |
| | | GGCCCCTTTGCATACCACTCAGACATTAAAAAAGTATCTCTGGGT | |
| | | ATGAAATACCGTTTTAAGTGGATCTGGGGTGGAAACCCCGTTCG | |
| | | CCAACAGGTTGTTAGAAATCCCTGCAAAGAAACCCACTCCTCGG | |
| | | GCAATAGAGTCCCTAGAAGCTTACAAATCGTTGACCCGAAATACA | |
| | | ACTCACCGGAACTCACATTCCATACCTGGGACTTCAGACGTGGT | |
| | | CTCTTTGGCCCAAGAGCTATTCAAAGAATGCAACAACAACCAACA | |
| | | ACTACTGACATTCTTTCAGCAGGCCGCAAGAGACCCAGAAAGGA | |
| | | CACGGAGGTGTACCACCCCAGCCAAGAAGGGGAGCAAAAAGAA | |
| | | AGCTTACTTTTCCCCCCAGTCAAGCTCCTCAGACGAGTCCCCCC | |
| | | GTGGGAAGACTCGCAGCAGGAGGAAAGCGGGTCGCAAAGCTCA | |
| | | GAGGAAGAGACGCAGACCGTCTCCCAGCAGCTCAAGCAGCAGC | |
| | | TGCAGCAACAGCAAATCCTGGGAGTCAAACTCAGACTCCTGTTC | |
| | | GACCAAGTCCAAAAAATCCAACAAAATCAAGATATCAACCCTACC | |
| | | TTGTTACCAAGGGGGGGGGATCTAGCATCGTTATTTCAAATAGC | |
| | | ACCATAA | |
| BAA85662.1 | AB026345.1 | ATGGCCTATGGCTGGTGGCGCCGAAGGAGAAGACGGTGGCGCA | 163 |
| | | GGTGGAGACGCAGACCATGGAGGCGCCGCTGGAGGACCCGAA | |
| | | GACGCAGACCTGCTAGACGCCGTGGCCGCCGCAGAAACGTAAG | |
| | | GAGACGCCGCAGAGGAGGGAGGTGGAGGAGGAGATATAGGAG | |
| | | ATGGAAAAGAAAGGGCAGGCGCAGAAAAAAAGCTAAAATAATAA | |
| | | TAAGACAATGGCAACCAAACTACAGAAGGAGATGTAACATAGTA | |
| | | GGCTACATCCCTGTACTAATATGTGGCGAAAATACTGTCAGCAG | |
| | | AAACTATGCCACACACTCAGACGATACTAACTACCCAGGACCCTT | |
| | | TGGGGGGGGTATGACTACAGACAAATTTACTTTAAGAATTCTGTA | |
| | | TGACGAGTACAAAAGGTTTATGAACTACTGGACAGCATCTAACGA | |
| | | AGACCTAGACCTTTGTAGATATCTAGGAGTAAACCTATACTTTTTC | |
| | | AGACACCCAGATGTAGATTTTATTATAAAAATTAATACCATGCCTC | |
| | | CTTTTCTAGACACAGAACTCACAGCCCCTAGCATACACCCAGGC | |
| | | ATGCTAGCCCTAGACAAAAGAGCAAGATGGATACCTAGCTTAAA | |
| | | ATCTAGACCAGGAAAAAAACACTATATTAAAATAAGAGTAGGGGC | |
| | | ACCAAAAATGTTCACTGATAAATGGTACCCCCAAACAGATCTTTG | |
| | | TGACATGGTGCTTCTAACTGTCTATGCAACCGCAGCGGATATGC | |
| | | AATATCCGTTCGGCTCACCACTAACTGACTCTGTGGTTGTGAACT | |
| | | TCCAGGTTCTGCAATCCATGTATGATGAAAAAATTAGCATATTAC | |
| | | CAGACCAAAAATCACAAAGAGAAAGCCTACTTACTAGCATAGCAA | |
| | | ATTACATTCCCTTTTATAATACCACACAAACTATAGCCCAATTAAA | |
| | | GCCATTTATAGATGCAGGCAATGTAACATCAGGCACAACAGCAA | |
| | | CAACATGGGGGTCATACATAAACACAACCAAGTTTACTACAACAG | |
| | | CCACAACAACTTATACATATCCAGGCACCACCACAACCACAGTAA | |
| | | CTATGTTAACCTCTAATGACTCCTGGTACAGAGGAACAGTATATA | |
| | | ACAACCAAATTAAAGACTTACCAAAAAAAGCAGCTGAATTATACT | |
| | | CAAAAGCAACAAAAACCTTGCTAGGAAACACCTTCACAACTGAAG | |
| | | ACTACACACTAGAATACCATGGAGGACTGTACAGCTCAATATGG | |
| | | CTATCCCCTGGTAGATCTTACTTTGAAACACCAGGAGCATATACA | |
| | | GACATAAAGTACAATCCATTTACAGACAGAGGAGAAGGCAACAT | |
| | | GTTATGGATAGACTGGCTAAGCAAAAAAAACATGAACTACGACAA | |
| | | AGTACAGAGTAAATGCTTAATATCAGACCTACCTCTATGGGCAGC | |
| | | AGCATATGGATATGTAGAATTTTGTGCAAAAAGTACAGGAGACCA | |
| | | GAACATACACATGAATGCCAGGCTACTAATAAGAAGTCCCTTTAC | |
| | | AGACCCACAACTACTAGTACACACAGACCCCACAAAAGGCTTTG | |
| | | TTCCTTACTCTTTAAACTTTGGAAATGGTAAAATGCCAGGAGGTA | |
| | | GTAGTAATGTGCCTATTAGAATGAGAGCTAAATGGTATCCAACAT | |
| | | TATTTCACCAGCAAGAAGTACTAGAGGCCTTAGCACAGTCAGGC | |
| | | CCCTTTGCATACCACTCAGACATTAAAAAAGTATCTCTGGGTATG | |
| | | AAATACCGTTTTAAGTGGATCTGGGGTGGAAACCCCGTTCGCCA | |
| | | ACAGGTTGTTAGAAATCCCTGCAAAGAAACCCACTCCTCGGGCA | |
| | | ATAGAGTCCCTAGAAGCTTACAAATCGTTGACCCGAAATACAACT | |
| | | CACCGGAACTCACATTCCATACCTGGGACTTCAGACGTGGCCTC | |
| | | TTTGGCCCGAAAGCTATTCAGAGAATGCAACAACAACCAACAACT | |
| | | ACTGACATTTTTTCAGCAGGCCGCAAGAGACCCAGGAGGGACAC | |
| | | CGAGGTGTACCACTCCAGCCAAGAAGGGGAGCAAAAAGAAAGC | |
| | | TTACTTTTCCCCCCAGTCAAGCTCCTCAGACGAGTCCCCCCGTG | |
| | | GGAAGACTCGCAGCAGGAGGAAAGCGGGTCGCAAAGCTCAGAG | |
| | | GAAGAGACGCAGACCGTCTCCCAGCAGCCCAAGCAGCAGCTGC | |
| | | AGCAACAGCGAATCCTGGGAGTCAAACTCAGACTCCTGTTCAAC | |
| | | CAAGTCCAAAAAATCCAACAAAATCAAGATATCAACCCTACCTTG | |
| | | TTACCAAGGGGGGGGGATCTAGCATCCTTATTTCAAGTAGCACC | |
| | | ATAA | |
| BAA85664.1 | AB026346.1 | ATGGCCTATGGCTGGTGGCGCCGAAGGAGAAGACGGTGGCGCA | 164 |
| | | GGTGGAGACGCAGACCATGGAGGCGCCGCTGGAGGACCCGAA | |
| | | GACGCAGACCTGCTAGACGCCGTGGCCGCCGCAGAAACGTAAG | |
| | | GAGACGCCGCAGAGGAGGGAGGTGGAGGAGGAGATATAGGAG | |
| | | ATGGAAAAGAAAGGGCAGGCGCAGAAAAAAAGCTAAAATAATAA | |
| | | TAAGACAATGGCAACCAAACTACAGAAGGAGATGTAACATAGTA | |
| | | GGCTACATCCCTGTACTAATATGTGGCGAAAATACTGTCAGCAG | |
| | | AAACTATGCCACACACTCAGACGATACCAACTACCCAGGACCCT | |
| | | TTGGGGGGGGTATGACTACAGACAAATTTACTTTAAGAATTCTGT | |
| | | ATGACGAGTACAAAAGGTTTATGAACTACTGGACAGCATCTAACG | |
| | | AAGATCTAGACCTTTGTAGATATCTAGGAGTAAACCTGTACTTTTT | |
| | | CAGACACCCAGATGTAGATTTTATCATAAAAATTAATACCATGCC | |
| | | TCCTTTTCTAGACACAGAACTCACAGCCCCTAGCATACACCCAGA | |
| | | CATGCTAGCCCTAGACAAAAGAGCAAGATGGATACCTAGCTTAA | |
| | | AATCTAGACCGGGAAAAAAACACTATATTAAAATAAGAGTTGGGG | |
| | | CACCAAAAATGTTCACTGATAAATGGTACCCCCAAACAGATCTTT | |
| | | GTGACATGGTGCTTCTAACTGTCTATGCAACCACAGCGGATATG | |
| | | CAATATCCGTTCGGCTCACCACTAACTGACTCTGTGGTTGTGAAC | |
| | | TTCCAGGTTCTGCAATCCATGTATGATGAAAACATTAGCATATTA | |
| | | CCAACCGAAAAATCAAAAAGAGATGTCCTACATAGTACTATAGCA | |
| | | AATTACACTCCCTTTTATAATACCACACAAATTATAGCCCAATTAA | |
| | | GGCCATTTGTAGATGCAGGCAATCTAACATCAGCGTCAACAACA | |
| | | ACAACATGGGGATCATACATAAACACAACCAAGTTTAATACAACA | |
| | | GCCACAACAACTTATACATATCCAGGCAGCACGACAACCACAGT | |
| | | AACTATGTTAACCTGTAATGACTCCTGGTACAGAGGAACAGTATA | |
| | | TAACAATCAAATTAGCAAGTTACCAAAACAAGCAGCTGAATTTTA | |
| | | CTCAAAAGCAACAAAAACCTTGCTAGGAAACACGTTCACAACTGA | |
| | | GGACCACACACTAGAATACCATGGAGGACTGTACAGCTCAATAT | |
| | | GGCTATCCGCTGGTAGATCTTACTTTGAAACACCAGGAGCATATA | |
| | | CAGACATAAAGTATAATCCATTCACAGACAGAGGAGAAGGCAAC | |
| | | ATGTTATGGATAGACTGGCTAAGCAAAAATAACATGAACTATGAC | |
| | | AAAGTACAAAGTAAATGCTTAATATCAGACCTACCTCTATGGGCA | |
| | | GCAGCATATGGATATGTAGAATTTTGTGCAAAAAGTACAGGAGAC | |
| | | CAGAACATACACATGAATGCCAGACTACTAATAAGAAGTCCCTTT | |
| | | ACAGACCCACAACTACTAGTACACACAGACCCCACAAAAGGCTT | |
| | | TGTTCCTTACTCTTTAAACTTTGGAAATGGTAAAATGCCAGGAGG | |
| | | TAGTAGTAATGTGCCTATTAGAATGAGAGCTAAATGGTATCCAAC | |
| | | ATTATTTCACCAGCAAGAAGTACTAGAGGCCTTAGCACAGTCAG | |
| | | GCCCCTTTGCATACCACTCAGACATTAAAAAAGTATCTCTGGGTA | |
| | | TGAAATACCGTTTTAAGTGGATCTGGGGTGGAAACCCCGTTCGC | |
| | | CAACAGGTTGTTAGAAATCCCTGCAAAGAAACCCACTCCTCGGG | |
| | | CAATAGAGTCCCTAGAAGCTTACAAATCGTTGACCCGAAATACAA | |
| | | CTCACCGGAACTCACATTCCATACCTGGGACTTCAGACGTGGCC | |
| | | TCTTTGGCCCGAAAGCTATTCAGAGAATGCAACAACAACCAACAA | |
| | | CTACTGACATTTTTTCAGCAGGCCGCAAGAGACCCAGGAGGGAC | |
| | | ACCGAGGTGTACCACTCCAGCCAAGAAGGGGAGCAAAAAGAAA | |
| | | GCTTACTTTTCCCCCCAGTCAAGCTCCTCAGACGAGTCCCCCCG | |
| | | TGGGAAGACTCGCAGCAGGAGGAAAGCGGGTCGCAAAGCTCAG | |
| | | AGGAAGAGACGCAGACCGTCTCCCAGCAGCTCAAGCAGCAGCT | |
| | | GCAGCAACAGCGAATCCTGGGAGTCAAACTCAGACTCCTGTTCA | |
| | | ACCAAGTCCAAAAAATCCACCAAAATCAAGATATCAACCCTACCT | |
| | | TGTTACCAAGGGGGGGGGATCTAGCATCCTTATTTCAAATAGCA | |
| | | CCATAA | |
| BAA85666.1 | AB026347.1 | ATGGCCTATGGCTGGTGGCGCCGAAGGAGAAGACGGTGGCGCA | 165 |
| | | GGTGGAGACGCAGACCATGGAGGCGCCGCTGGAGGACCCGAA | |
| | | GACGCAGACCTGCTAGACGCCGTGGCCGCCGCAGAAACGTAAG | |
| | | GAGACGCCGCAGAGGAGGGAGGTGGAGGAGGAGATATAGGAG | |
| | | ATGGAAAAGAAAGGGCAGGCGCAGAAAAAAAGCTAAAATAATAA | |
| | | TAAGACAATGGCAACCAAACTACAGAAGGAGATGTAACATAGTA | |
| | | GGCTACATCCCTGTACTAATATGTGGCGAAAATACTGTCAGCAG | |
| | | AAACTATGCCACACACTCAGACGATACCAACTACCCAGGACCCT | |
| | | TTGGGGGGGGTATGACTACAGACAAATTTACTTTAAGAATTCTGT | |
| | | ATGACGAGTACAAAAGGTTTATGAACTACTGGACAGCATCTAACG | |
| | | AAGATCTAGACCTTTGTAGATATCTAGGAGTAAACCTGTACTTTTT | |
| | | CAGACACCCAGATGTAGATTTTATCATAAAAATTAATACCATGCC | |
| | | TCCTTTTCTAGACACAGAACTCACAGCCCCTAGCATACACCCAG | |
| | | GCATGCTAGCCCTAGACAAAAGAGCAAGATGGATACCTAGCTTA | |
| | | AAATCTAGACCGGGAAAAAAACACTATATTAAAATAAGAGTTGAG | |
| | | GCACCAAAAATGTTCACTGATAAATGGTACCCCCAAACAGATCTT | |
| | | TGTGACATGGTGCTTCTAACTGTCTATGCAACCACAGCGGATATG | |
| | | CAATATCCGTTCGGCTCACCACTAACTGACTCTGTGGTTGTGAAC | |
| | | TTCCAGGTTCTGCAATCCATGTATGATCAAAACATTAGCATATTAC | |
| | | CAACCGAAAAATCAAAGAGAACACAACTACATGATAATATAACAA | |
| | | GGTACACTCCCTTTTATAATACCACACAAACTATAGCCCAATTAA | |
| | | AGCCATTTGTAGATGCAGGCAATGTAACACCAGTGTCACCAACA | |
| | | ACAACATGGGGATCATACATAAACACAACCAAGTTTACTACAACA | |
| | | GCCACAACAACTTATACATATCCAGGCACCACGACAACCACAGT | |
| | | AACTATGTTAACCTGTAATGACTCCTGGTACAGAGGAACAGTATA | |
| | | TAACAATCAAATTAGCCAGTTACCAAAAAAAGCAGCTGAATTTTA | |
| | | CTCAAAAGCAACAAAAACCTTGCTAGGAGACACGTTCACAACTG | |
| | | AGGACTACACACTAGAATACCATGGAGGACTGTACAGCTCAATA | |
| | | TGGCTATCCGCTGGTAGATCTTACTTTGAAACACCAGGAGTATAT | |
| | | ACAGACATAAAGTATAATCCATTCACAGACAGAGGAGAAGGCAA | |
| | | CATGTTATGGATAGACTGGCTAAGCAAAAAAAACATGAACTATGA | |
| | | CAAAGTACAAAGTAAATGCTTAATATCAGACCTACCTCTATGGGC | |
| | | AGCAGCATATGGATATGTAGAATTTTGTGCAAAAAGTACAGGAGA | |
| | | CCAAAACATACACATGAATGCCAAACTACTAATAAGAAGTCCCTT | |
| | | TACAGACCCACAACTACTAGTACACACAGACCCCACAAAAGGCT | |
| | | TTGTTCCTTACTCTTTAAACTTTGGAAATGGTAAAATGCCAGGAG | |
| | | GTAGTAGTAATGTGCCTATTAGAATGAGAGCTAAATGGTATCCAA | |
| | | CATTATTTCACCAGCAAGAAGTACTAGAGGCCTTAGCACAGTCA | |
| | | GGCCCCTTTGCATACCACTCAGACATTAAAAAAGTATCTCTGGGT | |
| | | ATGAAATACCGTTTTAAGTGGATCTGGGGTGGAAACCCCGTTCG | |
| | | CCAACAGGTTGTTAGAAATCCCTGCAAAGAAACCCACTCCTCGG | |
| | | GCAATAGAGTCCCTAGAAGCTTACAAATCGTTGACCCGAAATACA | |
| | | ACTCACCGGAACTCACATTCCATACCTGGGACTTCAGACGTGGC | |
| | | CTGTTTGGCCCGAAAGCTATTCAGAGAATGCAACAACAACCAAC | |
| | | AACTACTGACATTTTTTCAGCAGGCCGCAAGAGACCCAGGAGGG | |
| | | ACACCGAGGTGTACCACTCCAGCCAAGAAGGGGAGCAAAAAGA | |
| | | AAGCTTACTTTTCCTCCCAGTCAAGCTCCTCAGACGAGTCCCCC | |
| | | CGTGGGAAGACTCGCAGCAGGAGGAAAGCGGGTCGCAAAGCTC | |
| | | AGAGGAAGAGACGCAGACCGTCTCCCAGCAGCTCAAGCAGCAG | |
| | | CTGCAGCAACAGCGAATCCTGGGAGTCAAACTCAGACTCCTGTT | |
| | | CAACCAAGTCCAAAAAATCCAACAAAATCAAGATATCAACCCTAC | |
| | | CTTGTTACCAAGGGGGGGGGATCTGGCATCCTTATTTCAAATAG | |
| | | CACCATAA | |
| BAA90406.1 | AB030487.1 | ATGGCCTATGGGTGGTGGAGGAGACGCCGCAGAAGGTGGAAGA | 166 |
| | | GATGGAGGAGAAGGCCCAGGTGGAGACGCCCATGGAGGACCC | |
| | | GCAGACGCAGACCTGCTAGACGCCGTGGACGCCGCAGAACAGT | |
| | | AAGGAGACGGGAGCGCGGGAGGTGGAGGAGGCGCTATAGGAG | |
| | | GTGGAGGAAAAAGGGCAAACGCAGGATAAAAAAGAAACTTATAA | |
| | | TAAGACAGTGGCAGCCAAACTATACCAGAAAGTGCGACATATTA | |
| | | GGCTACATGCCTGTAATCATGTGTGGAGAGAACACTCTAATAAG | |
| | | AAACTATGCCACACACGCAAACGACTGCTACTGGCCGGGACCCT | |
| | | TTGGGGGCGGCATGGCCACCCAGAAATTCACACTCAGAATCCTG | |
| | | TACGATGACTACAAGAGGTTTATGAACTACTGGACCTCCTCAAAC | |
| | | GAGGACCTAGACCTCTGTAGATACAGGGGAGTCACCCTGTACTT | |
| | | TTTCAGACACCCAGATGTAGACTTTATCATCCTGATAAACACCAC | |
| | | ACCTCCGTTCGTAGATACAGAGATCACAGGACCCAGCATACATC | |
| | | CTGGCATGATGGCCCTCAACAAGAGAGCCAGGTTCATCCCCAGC | |
| | | CTAAAAACTAGACCTGGCAGAAGACACATAGTAAAGATTAGAGT | |
| | | GGGGGCCCCCAAACTGTACGAGGACAAATGGTACCCCCAGTCA | |
| | | GAACTCTGTGACATGCCCCTGCTAACCGTCTACGCGACCGCAGC | |
| | | GGATATGCAATATCCGTTCGGCTCACCACTAACTGACACTCCTGT | |
| | | TGTAACCTTCCAAGTGTTGCGCAGCATGTACAACGACGCCCTTA | |
| | | GCATACTTCCCTCTAACTTTGAACAGGACGACAATGCAGGCCAA | |
| | | AAACTTTACAATGAAATATCATCATATTTACCATACTACAACACCA | |
| | | CAGAAACAATAGCACAACTAAAGAGATATGTAGAAAATACAGAAA | |
| | | AAATTTCCACAACACCAAACCCATGGCAATCAAATTATGTAAACA | |
| | | CTATTACCTTCACCACTGCACAAAGTATTACAACTACAACCCCAT | |
| | | ACACCACCTTCTCAGACAGCTGGTACAGGGGCACAGTATACAAA | |
| | | AACGCAATCACTAAAGTGCCACTTGCCGCAGCTAAACTTTATGAA | |
| | | ACCCAAACAAAAAACCTGCTGTCTCCAACATTTACAGGAGGGTC | |
| | | CGAGTACCTAGAATACCATGGAGGCCTGTACAGCTCCATATGGC | |
| | | TATCAGCAGGCCGATCCTACTTTGAAACAAAGGGAGCATACACA | |
| | | GACATATGCTACAACCCCTACACAGACAGGGGAGAAGGGAACAT | |
| | | GTTGTGGATAGACTGGCTATCCAAAGGAGATTCCAGATATGACA | |
| | | AAGCACGCAGCAAATGTCTAATAGAAAAACTACCTATGTGGGCC | |
| | | GCAGTATATGGGTACGCAGAATACTGTGCAAAAGCCACAGGAGA | |
| | | CTCTAACATAGACATGAACGCCAGAGTAGTAATGAGGTGTCCAT | |
| | | ACACCGTACCCCAAATGATAGACACAAGCGATCCCCTCAGAGGC | |
| | | TTTATACCCTATAGCTTTAACTTTGGAAAGGGAAAAATGCCTGGA | |
| | | GGAACAAATCAAGTCCCCATAAGAATGAGAGCTAAGTGGTACCC | |
| | | TTGTCTCTTTCACCAAAAAGAAGTTCTAGAAGCTATAGGACAGTC | |
| | | AGGCCCCTTCGCCTACCATAGTGATCAGAAAAAAGCAGTACTAG | |
| | | GCCTAAAATACAGATTTCACTGGATATGGGGTGGAAACCCCGTG | |
| | | TTTCCACAGGTTGTTAGAAACCCCTGCAAAGACACCCAAGGTTC | |
| | | CACAGGCCCTAGAAAGCCTCGCTCAGTACAAATCATTGACCCGA | |
| | | AGTACAACACACCAGAGCTTACCATCCACGCGTGGGATTTCAGA | |
| | | CGTGGCTTCTTTGGCCCAAAAGCTATTAAAAGAATGCAACAACAA | |
| | | CCAACAGATGCTGAACTTCTTCCACCAGGCCGCAAGAGGAGCAG | |
| | | GAGAGACACCGAAGTCCTGCAAAGCAGCCAAGAAAGGCAAAAA | |
| | | GAAAGCTTACTTTTACAACAGCTCCACCTCCAGGGACGAGTACC | |
| | | CCCGTGGGAAAGCTTGCAAGGGTTGCAGACAGAAACAGAAAGC | |
| | | CAAAAAGAGCACGAGGGCACCCTTTCCCAGCAGATCAGAGAGC | |
| | | AGGTTCAGCAGCAGAAGCTCCTCGGGAGACAGCTCAGAGAAAT | |
| | | GTTCTTACAACTCCACAAAATCCTACAAAATCAACACGTCAACCC | |
| | | TACCTTATTGCCAAGGGATCAGGGTTTAATTTGGTGGTTTCAGAT | |
| | | TCAGTAA | |
| BAA90409.1 | AB030488.1 | ATGGCTTATGGGTGGTGGAGGAGACGCCGCAGGAGGTGGAAGA | 167 |
| | | GATGGAGGAGAAGGCCCAGGTGGAGACGCCCATGGAGGACCC | |
| | | GCAGACGCAGACCTGCTGGACGCCGTGGACGCCGCAGAACAGT | |
| | | AAGGAGACGGAGGCGCGGGAGGTGGAGGAGGCGCTATAGGAG | |
| | | GTGGAGGAAAAAGGGCAGACGCAGGAGAAAAAAGAAACTTATAA | |
| | | TAAGACAATGGCAGCCAAACTATACCAGAAAGTGCAACATAGTT | |
| | | GGTTACATGCCAGTCATCATGTGTGGAGAGAACACTCTAATCAG | |
| | | AAACTATGCCACACACGCATACAACTGCTCCTGGCCGGGACCCT | |
| | | TTGGGGGCGGCATGGCCACCCAAAAATTTACTCTGAGAATACTG | |
| | | TACGATGACTACAAAAGATTTATGAACTACTGGACCTCCTCAAAC | |
| | | GAGGACCTAGACCTGTGCAGATATAGAGGAGCTACACTGTACTT | |
| | | TTTCAGAGACCCAGATGTAGACTTTATTATACTGATAAACACCAC | |
| | | TCCTCCATTTGTAGACACAGAGATTACAGGGCCCAGCATACATC | |
| | | CCGGCATGCTGGCACTCAACAAGAGAGCAAGATTTATACCCAGC | |
| | | TTAAAGACTAGACCCAGCAGAAGACACATAGTAAAGATCAGAGT | |
| | | GGGGGCCCCCAAACTGTATGAGGACAAGTGGTACCCCCAGTCA | |
| | | GAACTTTGTGACATGCCCCTGCTAACCGTCTATGCGACCGCAAC | |
| | | GGATATGCAATATCCGTTCGGCTCACCACTAACTGACACTCCTAT | |
| | | TGTAACCTTCCAAGTGTTGCGCAGCATGTACAACGACGCCCTTA | |
| | | GCATACTTCCCTCTAACTTTGAAGGTGACGACAGTGCAGGCGCA | |
| | | AAACTTTACAAACAAATATCAGAATACATACCATACTATAACACCA | |
| | | CAGAAACAATAGCACAGTTAAAGGGATATGTAGAAAACACAGAAA | |
| | | AAACCCAAACAACACCTAATCCATGGCAATCAAAATATGTAAACA | |
| | | CAAAACCATTTGACACTGCACAAACAATTACAAACCAAAAGCCAT | |
| | | ACACTCCATTCGCAGACACATGGTACAGGGGCACAGCATACAAA | |
| | | GAAGAAATTAAAAATGTACCACTAAAAGCAGCCGAACTGTATGAA | |
| | | TTACATACTACACACCTGTTATCTACAACATTCACAGGAGGGTCC | |
| | | AAATACTTAGAATACCATGGAGGCTTATACAGCTCCATATGGCTG | |
| | | TCAGCAGGCCGCTCCTACTTTGAAACAAAAGGAGCATACACAGA | |
| | | CATTTGCTACAACCCCTACACAGACAGGGGAGAAGGCAACATGG | |
| | | TGTGGATAGACTGGCTAGTAAAGACAGACTCTAGATATGACAAG | |
| | | ACACGCAGCAAATGCCTTATAGAAAAACTACCTCTATGGGCTGC | |
| | | AGTATACGGGTACGCAGAGTACTGCGCCAAGGCCACAGGAGAC | |
| | | TCTAACATAGACATGAACGCCAGAGTAGTTATCAGGAGCCCCTA | |
| | | CACTACACCTCAAATGATAGACACCAACGACTCTCTAAGAGGCTT | |
| | | TATAGTATACAGCTTTAACTTTGGAAAGGGAAAAATGCCTGGAGG | |
| | | AACAAATCAAGTCCCCATAAGAATGAGAGCTAAGTGGTACCCTT | |
| | | GCCTCTTTCACCAAAAAGAAGTTCTAGAAGCTATAGGACAGTCAG | |
| | | GCCCCTTCGCCTACCATAGTGATCAGAAAAAAGCAGTACTAGGC | |
| | | CTAAAATACAGATTTCACTGGATATGGGGTGGAAACCCCGTGTTT | |
| | | CCACAGGTTGTTAGAAACCCCTGCAAAGACACCCAAGGTTCCAC | |
| | | AGGCCCTAGAAAGCCTCGCTCAGTACAAATCATTGACCCGAAGT | |
| | | ACAACACACCAGAGCTTACCATCCACGCGTGGGATTTCAGACGT | |
| | | GGCTTCTTTGGCCCAAAAGCTATTAAAAGAATGCAACAACAACCA | |
| | | ACAGATGCTGAACTTCTTCCACCAGGCCGCAAGAAGAGCAGGAG | |
| | | AGACACCGAAGTCCTGCAAAGCAGCCAAGAAAGGCAAAAAGAAA | |
| | | GCTTACTTTTCCAACAGCTCCAGCTCCAGCGACGAGTACCCCCG | |
| | | TGGGAAAGCTCGCAAGGGTCGCAGACAGAAACAGAAAGCCAAA | |
| | | AAGAGCAGGAGGGCACCCTCTCCCAGCAGCTCAGAGAGCAGCT | |
| | | TCAGCAGCAGAAGCTCCTCGGCAGACAGCTCAGGGAAATGTTCC | |
| | | TACAAATCCACAAAATCCTACAAAATCAACAAGTCAACCCTATTTT | |
| | | ATTGCCAAGGGATCAGGCTTTAATTTCCTGGTTTCAGATTCAGTA | |
| | | A | |
| BAA90412.1 | AB030489.1 | ATGGCCTATGGGTGGTGGAGGAGACGCCGCAGGAGGTGGAAGA | 168 |
| | | GATGGAGGAGAAGGCCCAGGTGGAGACGCCGCTGGAGGACCC | |
| | | GCAGACGCAGACCTGCTGGACGCCGTAGACGCCGCAGAACAGT | |
| | | AAGGAGACGCAGGCGCGGGAGGTGGAGGAGCAGATATAGGAG | |
| | | ATGGAGGCGAAAGGGCAGACGCAGGCGAAAAGAAAAACTAATA | |
| | | ATAAGACAATGGCAGCCAAACTATACCAGAAAGTGCAACATTGT | |
| | | GGGTTACATGCCAGTAATCATGTGTGGAGAAAATACTGTTATCAG | |
| | | AAACTATGCCACACACACATACGACTGCTCCTGGCCAGGACCCT | |
| | | TTGGGGGCGGCATGGCCACCCAAAAATTTACTCTGAGAATACTG | |
| | | TACGATGACTACAAAAGATTTATGAACTACTGGACCTCCTCAAAC | |
| | | GAGGACCTAGATCTCTGCAGATACAGAGGAGCAACCCTATACTT | |
| | | TTTCAGAGACCCAGATGTAGACTTTATTATACTTATAAACACTACT | |
| | | CCTCCATTTGTAGACACAGAAATAACAGGGCCCAGCATACACCC | |
| | | AGGCATGCTGGCACTAAACAAAAGAGCTAGATTCATTCCCAGTC | |
| | | TAAAAACCAGACCAGGCAGGAGACACATAGTAAAAATAAAAGTA | |
| | | GGGGCCCCTAGAATGTATGAAGACAAGTGGTACCCCCAGTCAGA | |
| | | ACTTTGTGACATGCCCCTCCTAACGATCTATGCAACCGCAACGG | |
| | | ATATGCAACATCCGTTCGGCTCACCACTAACTGACACTCCTGTTG | |
| | | TAACCTTCCAAGTGTTGCGCAGCATGTACAACGACGCCCTTAGC | |
| | | ATACTTCCCTCTAACTTTGAAGACGATTCAAGTCCAGGGGCTGCA | |
| | | CTTTACAAACAAATATCAGAATACATACCATACTATAACACCACAG | |
| | | AAACAATAGCACAGCTAAAGAGATATGTAGAAAACACAGAAAAAA | |
| | | CCCAAACAACACTTAATCCATGGCAATCAAGATATGTAAACACAA | |
| | | CACTATTTAACACTGCAGAAACAATTGCAAACCAAAAGCCATACA | |
| | | CTAAATTCGCAGACACATGGTACAGGGGCACAGCATACAAAGAC | |
| | | GCAATTAAAGACATACCACTAAAAGCAGCCGAATTGTATGTAAAC | |
| | | CAAACCAAATACCTGTTATCTACAACATTCACAGGAGGGTCCAAA | |
| | | TACTTAGAATACCATGGAGGCTTATACAGCTCCATATGGCTGTCA | |
| | | GCAGGCCGCTCCTACTTTGAAACAAAAGGAGCATACACAGACAT | |
| | | TTGCTACAACCCCTACACAGACAGGGGAGAAGGCAACATGGTGT | |
| | | GGATAGACTGGCTATCGAAAACAGACTCAAAATATGACAAGACC | |
| | | CGCAGCAAATGCCTTATAGAAAAACTGCCGCTATGGGCATCGGT | |
| | | ATACGGGTACGCAGAATACTGTGCCAAGGCCACAGGAGACTCTA | |
| | | ACATAGACATGAACGCCAGAGTAGTTATAAGATGCCCCTACACTA | |
| | | CACCTCAAATGATAGACACCACCGACCCAACTAGAGGGTTCATA | |
| | | GTATACAGCTTTAACTTTGGTAAGGGCAAAATGCCGGGAGGTAG | |
| | | CAATGAAGTACCCATAAGAATGAGAGCCAAATGGTACCCCTGCC | |
| | | TCTTTCACCAAAAAGAGGTCCTAGAAGCCATAGGCCAGTCAGGC | |
| | | CCCTTTGCTTATCACAGCGATCAAAAAAAAGCAGTTTTAGGTTTA | |
| | | AAATACAAATTTCACTGGATATGGGGTGGAAACCCCGTGTTCCC | |
| | | ACAGGTTATTAAAAACCCCTGCAAAAACACTCAATTTTCCACAGG | |
| | | CCCTAGAAAGCCTCGCTCATTACAAATCATTGACCCGAATTACAA | |
| | | CACACCAAAGCTTACCATCCACGCTTGGGATTTCAGACTTGGCTT | |
| | | CTTTGGCCCAAAAGCTATTAAAAGAATGCAACAACAACCAACAGA | |
| | | TGCTGAACTTCTTCCACCAGGCCGCAAGAGGAGCAGGAGAGAC | |
| | | ACCGAAGTCCTGCAAAGCAGCCAAGAAAGGCAAAAAGGAAACTT | |
| | | ACTTTTCCAACAGTTCCAGCTCCAGCGACGAGTACCCCCGTGGG | |
| | | AAAGCTCGCAAGGGTCGCAGACAGGAACACAAAGCCAAAAAGA | |
| | | GCAGGAGGGCACCCTCTCCCAGCAGCTCAGAGAGCAGCTTCAG | |
| | | CAGCAGAAGCTCCTCGGCAGACAGCTCAGGGAAATGTTCCTACA | |
| | | ACTCCACAAAATCCAACAAAATCAACACGTCAACCCTACCTTATT | |
| | | GCCAAGGGATCAGGCTTTAATTTGCTGGTTTCAGATTCAGTAA | |
| BAA90825.1 | AB038340.1 | ATGGCCTATGGCTGGTGGCGCCGAAGGAGAAGACGGTGGCGCA | 169 |
| | | GGTGGAGACGCAGACCATGGAGGCGCCGCTGGAGGACCCGAA | |
| | | GACGCAGACCTGCTAGACGCCGTGGCCGCCGCAGAAACGTAAG | |
| | | GAGACGCCGCAGAGGAGGGAGGTGGAGGAGGAGATATAGGAG | |
| | | ATGGAAAAGAAAGGGCAGGCGCAGAAAAAAAGCTAAAATAATAA | |
| | | TAAGACAATGGCAACCAAACTACAGAAGGAGATGTAACATAGTA | |
| | | GGCTACATCCCTGTACTAATATGTGGCGAAAATACTGTCAGCAG | |
| | | AAACTATGCCACACACTCAGACGATACTAACTACCCAGGACCCTT | |
| | | TGGGGGGGGTATGACTACAGACAAATTTACTTTAAGAATTCTGTA | |
| | | TGACGAGTACAAAAGGTTTATGAACTACTGGACAGCATCTAACGA | |
| | | AGACCTAGACCTTTGTAGATATCTAGGAGTAAACCTATACTTTTTC | |
| | | AGACACCCAGATGTAGATTTTATTATAAAAATTAATACCATGCCTC | |
| | | CTTTTCTAGACACAGAACTCACAGCCCCTAGCATACACCCAGGC | |
| | | ATGCTAGCCCTAGACAAAAGAGCAAGATGGATACCTAGCTTAAA | |
| | | ATCTAGACCAGGAAAAAAACACTATATTAAAATAAGAGTAGGGGC | |
| | | ACCAAAAATGTTCACTGATAAATGGTACCCCCAAACAGATCTTTG | |
| | | TGACATGGTGCTTCTAACTGTCTATGCAACCGCAGCGGATATGC | |
| | | AATATCCGTTCGGCTCACCACTAACTGACTCTGTGGTTGTGAACT | |
| | | TCCAGGTTCTGCAATCCATGTATGATGAAAAAATTAGCATATTAC | |
| | | CAGACCAAAAATCACAAAGAGAAAGCCTACTTACTAGCATAGCAA | |
| | | ATTACATTCCCTTTTATAATACCACACAAACTATAGCCCAATTAAA | |
| | | GCCATTTATAGATGCAGGCAATGTAACATCAGGCACAACAGCAA | |
| | | CAACATGGGGGTCATACATAAACACAACCAAGTTTACTACAACAG | |
| | | CCACAACAACTTATACATATCCAGGCACCACCACAACCACAGTAA | |
| | | CTATGTTAACCTCTAATGACTCCTGGTACAGAGGAACAGTATATA | |
| | | ACAACCAAATTAAAGACTTACCAAAAAAAGCAGCTGAATTATACT | |
| | | CAAAAGCAACAAAAACCTTGCTAGGAAACACCTTCACAACTGAAG | |
| | | ACTACACACTAGAATACCATGGAGGACTGTACAGCTCAATATGG | |
| | | CTATCCCCTGGTAGATCTTACTTTGAAACACCAGGAGCATATACA | |
| | | GACATAAAGTACAATCCATTTACAGACAGAGGAGAAGGCAACAT | |
| | | GTTATGGATAGACTGGCTAAGCAAAAAAAACATGAACTACGACAA | |
| | | AGTACAGAGTAAATGCTTAATATCAGACCTACCTCTATGGGCAGC | |
| | | AGCATATGGATATGTAGAATTTTGTGCAAAAAGTACAGGAGACCA | |
| | | GAACATACACATGAATGCCAGGCTACTAATAAGAAGTCCCTTTAC | |
| | | AGACCCACAACTACTAGTACACACAGACCCCACAAAAGGCTTTG | |
| | | TTCCTTACTCTTTAAACTTTGGAAATGGTAAAATGCCAGGAGGTA | |
| | | GTAGTAATGTGCCTATTAGAATGAGAGCTAAATGGTATCCAACAT | |
| | | TATTTCACCAGCAAGAAGTACTAGAGGCCTTAGCACAGTCAGGC | |
| | | CCCTTTGCATACCACTCAGACATTAAAAAAGTATCTCTGGGTATG | |
| | | AAATACCGTTTTAAGTGGATCTGGGGTGGAAACCCCGTTCGCCA | |
| | | ACAGGTTGTTAGAAATCCCTGCAAAGAAACCCACTCCTCGGGCA | |
| | | ATAGAGTCCCTAGAAGCTTACAAATCGTTGACCCGAAATACAACT | |
| | | CACCGGAACTCACATTCCATACCTGGGACTTCAGACGTGGCCTC | |
| | | TTTGGCCCGAAAGCTATTCAGAGAATGCAACAACAACCAACAACT | |
| | | ACTGACATTTTTTCAGCAGGCCGCAAGAGACCCAGGAGGGACAC | |
| | | CGAGGTGTACCACTCCAGCCAAGAAGGGGAGCAAAAAGAAAGC | |
| | | TTACTTTTCCCCCCAGTCAAGCTCCTCAGACGAGTCCCCCCGTG | |
| | | GGAAGACTCGCAGCAGGAGGAAAGCGGGTCGCAAAGCTCAGAG | |
| | | GAAGAGACGCAGACCGTCTCCCAGCAGCCCAAGCAGCAGCTGC | |
| | | AGCAACAGCGAATCCTGGGAGTCAAACTCAGACTCCTGTTCAAC | |
| | | CAAGTCCAAAAAATCCAACAAAATCAAGATATCAACCCTACCTTG | |
| | | TTACCAAGGGGGGGGGATCTAGCATCCTTATTTCAAGTAGCACC | |
| | | ATAA | |
| BAA93586 .1 | AB038622.1 | ACGGCTTGGTGGTGGGGCAGATGGAGGCGCCGCTGGAGGCCT | 170 |
| | | CGCTATCGCAGACGCACCTGGAGGGTACGAAGAAGACGACCTA | |
| | | GACGAACTTTTCGCCGCCGCCGCCGAGGACGATATGTGAGTAG | |
| | | GCGGAGGCGCCGCCGCTACTACAGGCGCAGACTGAGACGGGG | |
| | | CAGACGCAGAGGGCGACGAAAGAGACACAGACAGACTCTAGTC | |
| | | CTCAGACAGTGGCAACCAGACATTGTCAGACACTGTAAAATTACA | |
| | | GGATGGATGCCCCTTATCATCTGTGGCTCAGGGAGCACACAGAA | |
| | | CAATTTTATAACTCACATGGACGACTTTCCTCCCATGGGCTACTC | |
| | | CTTCGGGGGCAACTTTACAAACCTCTCCTTCTCCTTAGAGGGCAT | |
| | | TTATGAACAATTTCTGTACCACAGAAACAGGTGGTCTCGCTCCAA | |
| | | CCATGACCTAGACCTAGCCAGATACAAAGGCACAACTCTAAAAC | |
| | | TCTACAGACACCACACCTTAGACTACATAGTCAGCTACAACAGAA | |
| | | CAGGCCCTTTCCAGATCAGTGACATGACCTACCTCAGCACACAC | |
| | | CCTGCACTCATGCTACTCCAGAAACACAGAATAGTAGTACCCAG | |
| | | CCTACTCACTAAACCTAAAGGCAAGAGATCCATAAAAGTTAGAAT | |
| | | AAAGCCACCAAAACTCATGCTCAACAAATGGTACTTCACCAAAGA | |
| | | CATATGCAGCATGGGCCTCTTCCAACTACAGGCCACAGCATGCA | |
| | | CCCTATACAACCCCTGGCTCAGAGACACCACAAAAAGCCCAGTC | |
| | | ATAGGCTTCAGAGTACTTAAAAACAGTATTTATACAAACCTCAGC | |
| | | AACCTACCAGAACATGATCAAACCAGACAAGCCATTAGACGAAA | |
| | | ACTACACCCAGACTCCTTAACAGGATCAACTCCATATCAAAAAGG | |
| | | CTGGGAATACAGCTACACAAAACTAATGGCTCCAATATACTATCA | |
| | | AGCAAATAGAAACAGCACATACAACTGGCTAAATTATCAAACAAA | |
| | | CTATGCTCAAACATTCACCAAATTTAAAGAAAAAATGAATGAAAAC | |
| | | CTTGCACTAATTCAAAAAGAGTATTCATACCACTATCCCAACAAT | |
| | | GTCACTACAGACCTTATTGGCAAAAACACCCTCACACATGACTG | |
| | | GGGTATATACAGTCCCTACTGGCTAACACCCACCAGAATAAGCC | |
| | | TAGACTGGGAAACACCCTGGACATATGTCAGATACAATCCACTA | |
| | | GCAGACAAGGGCATAGGCAATGCTGTCTATGCACAATGGTGCTC | |
| | | AGAACAGACCAGTAAATTAGATACAAAAAAGAGCAAGTGCATAAT | |
| | | GAAAGACCTGCCACTGTGGTGCATATTTTATGGCTATGTAGATTG | |
| | | GATAATAAAATCCACAGGAGTCAGCAGCGCAGTCACTGACATGA | |
| | | GAGTAGCCATCATCAGCCCCTACACCGAACCAGCACTTATAGGG | |
| | | TCAAGTCCAGACGTAGGCTACATTCCAGTAAGTGACACCTTTTGC | |
| | | AATGGAGACATGCCGTTTCTTGCTCCATACATCCCTGTGGGCTG | |
| | | GTGGATCAAATGGTACCCTATGATTGCACACCAAAAGGAAGTGT | |
| | | TTGAGGCAATAGTTAACTGTGGACCGTTTGTGCCCAGAGACCAG | |
| | | ACCACTCCCAGTTGGGAAATTACCATGGGTTACAAAATGGACTG | |
| | | GTTATGGGGTGGCTCTCCCCTGCCTTCACAGGCAATCGACGACC | |
| | | CCTGCCAGAAGCCCACCCACGAACTACCCGATCCCGATAGACAC | |
| | | CCTCGCATGTTACAAGTCTCTGACCCGACAAAGCTCGGACCGAA | |
| | | GACAGTGTTCCACAAATGGGACTGGAGACGTGGGATGCTTAGCA | |
| | | AAAGAAGTATTAAAAGAGTCCAGGAGGACTCAACAGATGATGAA | |
| | | TATGTTGCAGGGCCTTTACCAAGAAAAAGAAACAAATTCGATACC | |
| | | AGAGCCCAAGGGCTGCAAACCCCCGAAAAAGAAAGCTACACTTT | |
| | | ACTCCAAGCCCTCCAAGAGTCGGGGCAAGAGACCAGCTCAGAA | |
| | | GACCAAGAACAAGCACCCCAAGAAAAAGAGGGTCAGAAGGAAG | |
| | | CGCTCATGGAGCAGCTCCAGCTCCAGAAACAGCACCAGCGAGT | |
| | | CCTCAAGCGAGGCCTCAAACTCCTCCTCGGAGACGTCCTCCGAC | |
| | | TCCGGAGAGGAGTCCACTGGGACCCCCTCCTGTCATAA | |
| BAA93589.1 | AB038623.1 | ACGGCGTGGTGGTGGGGCAGATGGAGGCGTCGATGGAGGCCT | 171 |
| | | CGCTATCGCAAACGCACCTGGAGATTACGGAGACGACGACCTA | |
| | | GACGAACTTTTCGCCGCCGCCGCCGAAGACAATATGTGAGTAGG | |
| | | CGGAGGCGCCGCCGCTACTACAGGCGCAGACTGAGACGGGGC | |
| | | AGACGCAGAGGGCGACGAAAGAGACACAGACAGACTCTAGTCC | |
| | | TCAGACAATGGCAACCAGACGTTGTTAGACACTGTAAAATTACAG | |
| | | GATGGATGCCCCTTATCATCTGTGGCTCCGGGAGCACACAGAAC | |
| | | AATTTTATAACTCACATGGACGACTTTCCTCCCATGGGCTACTCC | |
| | | TTTGGGGGCAACTTTACAAACCTCACCTTCTCCTTAGAGGGCATA | |
| | | TATGAACAATTTCTGTACCACAGAAACAGGTGGTCTCGCTCCAAC | |
| | | CATGACCTAGACCTAGCCAGATACAAAGGCACAACTCTAAAACT | |
| | | CTACAGACACCACACCTTAGACTACATAGTCAGCTACAACAGAAC | |
| | | AGGCCCCTTCCAGATCAGTGACATGACCTACCCCAGCACACACC | |
| | | CTGCACTTATGCTACTCCAGAAACACAGAATAGTAGTGCCCAGC | |
| | | GTACTCACTAAACCTAAAGGCAAGAGATCCATAAAGGTCAGAATA | |
| | | AAGCCACCAAAACTCATGCTTAACAAGTGGTACTTCACCAAAGAC | |
| | | ATATGCAGCATGGGCCTTTTTCAACTACAGGCCACAGCATGCAC | |
| | | CCTATACAATCCCTGGCTCAGAGACACCACAAAAAGCCCAGTCA | |
| | | TAGGCTTCAGGGTACTTAAAAACAGTATCTATACAAACCTCAGCA | |
| | | ACCTACCAGACCATGAGGGTTCCAGAGAAGCCATAAGAAAAAAA | |
| | | CTACACCCACAATCCTTAACAGGACACTCTCCCAACCAAAAAGG | |
| | | CTGGGAATACAGCTATACTAAACTAATGGCTCCAATATACTACTC | |
| | | TGCCAACAGAAACAGTACATATAACTGGCTAAACTATCAAGACAA | |
| | | CTATGTAGCCACATATACTAAATTCAAAGTCAAAATGACAGACAA | |
| | | CTTACAACTAATACAAAAAGAATACTCATACCACTATCCCAACAAT | |
| | | ACCACTACAGACCTTATTAAGAACAACACCCTTACACATGACTGG | |
| | | GGCATATACAGTCCCTACTGGCTAACACCCACCAGAATAAGCCT | |
| | | AGACTGGGAAACACCCTGGACATATGTAAGATACAACCCACTGG | |
| | | CAGACAAAGGCATAGGCAATGCTGTCTACGCACAGTGGTGCTCA | |
| | | GAACAGACAAGCAAATTAGACCCAAAAAAGAGCAAGTGCATAAT | |
| | | GAGAGACCTGCCACTGTGGTGCATATTTTATGGCTATGTAGATTG | |
| | | GATAGTAAAATCCACAGGAGTCAGCAGCGCAGTCACTGACATGA | |
| | | GAGTAGCCATTAGAAGCCCCTACACTGAACCAGCACTTATAGGG | |
| | | TCAACTGAAGATGTAGGCTTCATTCCAGTAAGTGACACCTTTTGC | |
| | | AACGGAGACATGCCGTTTCTTGCTCCATACATTCCTGTGGGCTG | |
| | | GTGGATCAAGTGGTACCCCATGATTGCACACCAAAAGGAAGTGT | |
| | | TTGAGCAAATAGTAAACTGTGGACCGTTTGTGCCCAGAGACCAG | |
| | | ACCACTCCCAGTTGGGAAATTACCATGGGTTACAAAATGGACTG | |
| | | GTTATGGGGTGGCTCTCCCCTGCCTTCACAGGCAATCGACGACC | |
| | | CCTGCCAGAAGCCCACCCACGAACTACCCGATCCCGATAGACAC | |
| | | CCTCGCATGTTACAAGTCTCTGACCCGACAAAGCTCGGACCGAA | |
| | | GACAGTGTTCCACAGATGGGACTGGAGACGTGGGATGCTTAGC | |
| | | AAAAGAAGTATTAAAAGAGTCCAGGAGGACTCAACAGATGATGA | |
| | | ATATGTTGCAGGGCCTTTACCAAGAAAAAGAAACAAGTTCGATAC | |
| | | CAGAGCCCAAGGGCTCCAAAGCCCCGAAAAAGAAAGCTACACTT | |
| | | TACTCCAAGCCCTCCAAGAGTCGGGGCAAGAGAGCAGCTCAGA | |
| | | AGACCAAGAACAAGCACCCCAAGAAAAAGAGGGTCAGAAGGAA | |
| | | GCGCTCATGGAGCAGCTCCAGCTCCAGAAACAGCACCAGCGAG | |
| | | TCCTCAAGCGAGGCCTCAAACTCCTCCTCGGAGACGTTCTCCGA | |
| | | CTCCGGAGAGGAGTACACTGGGACCCCCTCCTGTCATAA | |
| BAA93592.1 | AB038624.1 | ACGGCGTGGTGGTGGGGCAGATGGAGGCGCCGCTGGAGGCCT | 172 |
| | | CGCTATCGCAGACGCACCTGGAGGGTACGCAGAAGACGACCTA | |
| | | GACGAACTTTTCGCCGCCGCCGCCGAGGACGATATGTGAGTAG | |
| | | GCGGAGGCGCCGCCGCTACTACAGGCGCAGACTCAGACGGGG | |
| | | CAGACGCAGAGGGCGACGAAAGAGACACAGACAGACTCTAGTC | |
| | | CTCAGACAATGGCAACCAGACGTTCTTAGACGCTGTAAAATTACA | |
| | | GGATGGATGCCCCTTATCATCTGTGGCTCCGGAAGCACACAGAA | |
| | | CAATTTTATAACTCACATGGACGACTTTCCTCCCATGGGCTACTC | |
| | | CTACGGGGGCAACTTTACAAACCTCACCTTCTCCTTAGAGGGCA | |
| | | TATATGAACAATTTCTGTACCACAGAAACAGGTGGTCTCGCTCCA | |
| | | ACCATGACCTAGACCTAGCCAGATACAAAGGCACAACTCTAAAA | |
| | | CTCTACAGACACCACACCTTAGACTACATAGTGAGCTACAATAGA | |
| | | ACAGGCCCTTTCCAGATCAGTGACATGACCTACCTCAGCACACA | |
| | | CCCTGCACTTATGCTACTCCAGAAACACAGAATAGTAGTGCCCA | |
| | | GCCTACTCACTAAACCTAAAGGCAAGAGATCCATAAAAGTTAGAA | |
| | | TAAAACCACCAAAACTCATGCTTAACAAGTGGTACTTCACCAAAG | |
| | | ACATATGCAGCATGGGCCTTTTTCAACTACAGGCCACAGCATGC | |
| | | ACCCTATACAACCCCTGGCTCAGAGACACCACAAAAAGCCCAGT | |
| | | CATAGGCTTCAGGGTACTTAAAAACAGTATTTATACAAACCTCAG | |
| | | CAACCTACCAGACCATGAAGGAGCCAGAGAGGCCATAAGAAAAA | |
| | | AACTACACCCACAATCCTTAACAGGATCTGTCCCAAACCAAAAAG | |
| | | GTTGGGAATACAGCTACACAAAACTAATGGCTCCCATTTACTACC | |
| | | AAGCCATTAGAAACAGCACATACAACTGGCTAAACTATCAACAAA | |
| | | ATTACTCACAAACATACCAAACCTTTAAACAAAAAATGCAAGACA | |
| | | ACTTACAACTAATACAAAAAGAATACATGTACCACTACCCAAACA | |
| | | ATGTAACAACAGACATACTAGGCAAAAACACACTTACACATGACT | |
| | | GGGGCATATACAGTCCCTACTGGCTAACACCCACCAGAATCAGC | |
| | | CTAGACTGGGAAACACCTTGGACATATGTTAGATACAATCCACTA | |
| | | GCAGACAAGGGCATAGGCAATGCTGTCTATGCACAGTGGTGCTC | |
| | | AGAACAGACCAGTAACTTAGATACAAAAAAGAGCAAGTGCATAAT | |
| | | GAAAGACCTGCCACTGTGGTGCATATTTTATGGCTATGTAGATTG | |
| | | GGTAGTAAAATCCACAGGCGTCAGCAGCGCAGTGACTGACATGA | |
| | | GAGTAGCCATCATTAGCCCCTACACTGAACCAGCACTTATAGGG | |
| | | TCAAGTCCAGAGGTAGGCTACATTCCAGTAAGTGACACCTTTTGC | |
| | | AATGGAGACACGCCGTTTCTTGCTCCATACATCCCTGTGGGCTG | |
| | | GTGGATCAAGTGGTACCCCATGATTGCACACCAAAAGGAAGTGT | |
| | | TTGAGGCAATAGTAAACTGTGGACCGTTTGTGCCCAGAGACCAG | |
| | | ACCACTCCCAGTTGGGAAATTACCATGGGTTACAAAATGGACTG | |
| | | GTTATGGGGTGGCTCTCCCCTGCCTTCACAGGCAATCGACGACC | |
| | | CCTGCCAGAAGCCCACCCACGAACTACCCGATCCCGATAGACAC | |
| | | CCTCGCATGTTACAAGTCTCTGACCCGACAAAGCTCGGACCGAA | |
| | | GACAGTGTTCCACAAATGGGACTGGAGACGTGGGATGCTTAGCA | |
| | | AAAGAAGTATTAAAAGAGTCCAGGAGGACTCAACAGATGATGAA | |
| | | TATGTTGCAGGGCCTTTACCAAGAAAAAGAAACAAGTTCGATACC | |
| | | AGAGCCCAAGGGCTCCAAAGCCCCGAAAAAGAAAGCTACACTTT | |
| | | ACTCCAAGCCCTCCAAGAGTCGGGGCAAGAGACGAGCTCAGAA | |
| | | GACCAAGAACAAGCACCCCAAGAAAAAGAGGGTCAGAAGGAAG | |
| | | CGCTCATGGAGCAGCTCCAGCTCCAGAAACAGCACCAGCGAGT | |
| | | CCTCAAGCGAGGCCTCAAACTCCTCCTCGGAGACGTTCTCCGAC | |
| | | TCCGGAGAGGAGTACACTGGGACCCCCTCCTGTCATAA | |
| AAF71533.1 | AF254410.1 | ATGGCACAGGGGAGGCGCAGATACAGACGGGGTTGGCAACGCA | 173 |
| | | GGGTGTATCTGAGACGCAGGAGACGCAGGAGACGAAAGAGACT | |
| | | TGTACTGACTCAGTGGCACCCCGCAGTTAGGAGAAAATGCACCA | |
| | | TCACGGGGTACATGCCCGTGGTGTGGTGCGGACACGGCAGGGC | |
| | | CAGCTACAACTACGCCTGGCATTCAGATGACTGTATAAAACAGC | |
| | | CCTGGCCCTTTGGAGGGTCTCTGTCCACCGTGTCCTTTAACCTT | |
| | | AAAGTACTGTATGACGAAAACCAGAGGGGACTTAACAGATGGAC | |
| | | GTACCCCAACGATCAGCTAGACCTCGGCCGCTACAAGGGCTGC | |
| | | AAACTAACATTCTACAGAACCAAAAATACCAACTACCCAGGACCC | |
| | | TTTGGGGGGGGTATGACTACAGACAAATTTACTTTAAGAATTCTG | |
| | | TATGACGAGTACAAAAGGTTTATGAACTACTGGACAGCATCTAAC | |
| | | GAAGACCTAGACCTTTGTAGATATTTAGGAGTAAACCTGTACATT | |
| | | TTCAGACACCCAGATGTAGATTTTATCATAAAAATTAATACCATGC | |
| | | CTCCTTTTCTAGACACAGAAATCACAGCCGCTAGCATACACCCA | |
| | | GGCATACTAGCCCTAGACAAAAGAGCAAGATGGATACCTAGCTT | |
| | | AAAATCTAGACCAGGAAAAAAACACTATATTAAAATAAGAGTAGG | |
| | | GGCACCAAAAATGTTCACTGATAAATGGTACCCCCAAACAGATCT | |
| | | CTGTGACATGGTGCTTCTAACTATCTATGCAACCGCAGCGGATAT | |
| | | GCAATATCCGTTCGGCTCACCACTAACTGACACTGTGGTTGTGA | |
| | | ACTTCCAGGTTCTGCAATCCATGTATGATGAAAACATTAGCATAT | |
| | | TACCAGACCAAAAGACACAAAGAGAGAAACTACTTACTAGCATAT | |
| | | CAAACTACATTCCCTTTTATAATACCACACAAACTATAGCCCAATT | |
| | | GAAGCCATTTGTAGATGCAGGCAATAAAGTATCAGGCACAACAA | |
| | | CAACAACATGGGCATCATACATAAACACAACCAGATTTACTACAA | |
| | | CAGCCACAACAACTTATACATATCCAGGCTCTACCACTAACACAG | |
| | | TAACTATGTTAACCTCTAATGACTCCTGGTACAGAGGAACAGTAT | |
| | | ATAACAATCAAATTAAAAACTTACCAAAACAAGCAGCTGAATTATA | |
| | | CTCAAAAGCAACAAAAACCTTGCTAGGAAACACCTTCACAACTGA | |
| | | AGACTACACACTAGAATACCATGGAGGACTGTACAGCTCAATAT | |
| | | GGCTATCCCCTGGTAGATCTTACTTTGAAACACCAGGAGCATAC | |
| | | ACAGATATAAAGTACAATCCATTTACAGACAGAGGAGAAGGCAA | |
| | | CATGTTATGGATAGACTGGCTAAGCAAAAAAAACATGAACTATGA | |
| | | CAAAGTACAAAGTAAATGCTTAGTATCAGACCTACCTCTATGGGC | |
| | | AGCAGCATATGGATATGTAGAATTTTGTGCAAAAAGTACAGGAGA | |
| | | CCAGAACATACACATGAATGCCAGGCTACTAATAAGAAGTCCCTT | |
| | | TACAGACCCACAGCTACTAGTACACACAGACCCCACAAAAGCCT | |
| | | TTGTTCCCTACTCTTTAAACTTTGGAAATGGTAAAATGCCAGGAG | |
| | | GTAGTAGTAATGTGCCTATTAGAATGAGAGCTAAATGGTATCCCA | |
| | | CTTTATTCCACCAACAAGAAGTTCTAGAGGCTTTAGCGCAGTCAG | |
| | | GACCCTTCGCTTATCACTCAGACATTAAAAAAGTATCTCTAGGCA | |
| | | TAAAATACCGTTTTAAGTGGATCTGGGGTGGAAACCCCGTTCGC | |
| | | CAACAGGTTGTTAGAAATCCCTGCAAGGAACCCCACTCCTCGGG | |
| | | CAATAGAGTCCCTAGAAGCATACAAATCGTTGACCAGAAATACAA | |
| | | CTCACCGGAACTTACCATCCATTCCTGGGACTTCAGACGTGGCT | |
| | | TCTTTGGCCCGAAAGCTATTCAAAGAATGCAACAACAACCAACTG | |
| | | CTACTGAATTTTTTTCAGCAGGCCGCAAGAGACCCAGAAGGGAC | |
| | | ACAGAAGTATATCAGTCCGACCAAGAAAAGGAGCAAAAAGAAAG | |
| | | CTCGCTTTTCCCCCCAGTCAAGCTCCTCCGAAGAGTCCCCCCGT | |
| | | GGGAGGACTCGGACAGGAAGCAAAGCGGGTCGCAAAGCTCAGA | |
| | | GGAAGAGACGCAGACCGTCTCCCAGCAGCTCAAGCAGCAGCTG | |
| | | CAGCAACAGCGAATCCTGGGAGTCAAACTCAGACTCCTGTTCTA | |
| | | CCAAATCCAAAGAATCCAACAAAATCAAGATATCAACCCTACCTT | |
| | | GTTACCAAGGGGGGGGGATCTAGCATCCTTATTTCAAATAGCAT | |
| | | AA | |
| BAB19928.1 | AB050448.1 | ATGGCGTGGACCTGGTGGTGGCAGAGGAGGCGCCGAAGGTGG | 174 |
| | | CCGTGGAGAAGGAGAAGGTGGAGAAGACTACGCACAAGAAGAC | |
| | | CTAGACGCCTTGTTCGACGCCGTCGCAAGAGATACAGAGTAAGG | |
| | | AGACGGAGGCGGTGGGGAAGGAGACGTGGGCGACGCACATAC | |
| | | CTTAGACGCGGACTTAAAAAGAGAAAAAGGAGAAAAAAACTCAG | |
| | | ACTGACTCAGTGGAACCCTAGCACAATTAGGGGATGTACAATTA | |
| | | AGGGAATGGCGCCCCTAATAGTGTGCGGCCACACCATGGCTGG | |
| | | CAATAACTTTGCCATCCGAATGGAGGACTATGTATCTCAGATTAA | |
| | | ACCGTTCGGAGGGTCCTTCAGTACCACCACCTGGAGCTTAAAAG | |
| | | TACTGTGGGACGAGCACACCAGATTCCACAACACCTGGAGCTAC | |
| | | CCAAACACTCAGCTAGACTTAGCCAGGTTCAAAGGAGTAACCTT | |
| | | CTACTTCTACAGAGACAAAGACACAGACTTTATTATAACCTATAG | |
| | | CTCCGTGCCACCTTTTAAAATAGACAAATACTCCTCAGCCATGCT | |
| | | ACACCCAGGCATGCTTATGCAGAGAAAAAAGAAGATATTATTACC | |
| | | CAGCTTTACAACCAGACCTAGGGGCAGAAAAAAAGTTAAAGTAC | |
| | | ACATAAAACCTCCTGTCTTATTTGAAGACAAATGGTACACCCAGC | |
| | | AGGACCTGTGCGACGTTAATCTTTTGTCACTTGCGGTTTCTGCG | |
| | | GCTTCCTTTAGACATCCGTTCTGCCCACCACAAACTGACAACATT | |
| | | TGCATAACCTTCCAGGTGTTGAAAGACAAGTATTACACACAAATG | |
| | | TCAGTTACACCAGATACCGCAGGTACAAAAAAAGACGACGAAAT | |
| | | TCTTGACCACTTATACTCAACTGCAGAATACTATCAAACTGTTCAC | |
| | | ACACAAGGAATAATTAACAAAACACAAAGAGTAGCTAAATTCTCC | |
| | | ACCTCTAATAATACCCTAGGTGACCAAAGTGAGATATCATTATAT | |
| | | TTAAACCAACCAACAACAACTAACATAGGAAACACGTTATCCACA | |
| | | GGCCATAACTCAGTGTATGGCTTTCCATCATACAACCCACAAAAA | |
| | | GACAAACTTAGAAAAATAGCAGACTGGTTTTGGACACAGGAAGC | |
| | | CAACAAAGAGAATGTAGTTACAGGCTCATACTCAATGCCTACTAA | |
| | | CAAAGCAGTAGGCTATCACCTAGGAAAATATAGCCCTATATTCCT | |
| | | AAGTTCATACAGAACCAACCTACAATTTAGAACAGCATACACAGA | |
| | | CGTTACATACAACCCACTAAATGACAAAGGTAAAGGCAATGAAAT | |
| | | TTGGGTACAATATGTAACAAAACCAGACACTGTGTTCAACCCCAC | |
| | | ACAGTGTAAATGCCATGTAATAGATTTACCCTTGTGGTCAGCATT | |
| | | CCATGGATACATAGACTTTGTACAAAGTGAACTAGGAATTCAAGA | |
| | | AGAAATACTAAACATTGCCATTATAGTAGTTATATGTCCATACACA | |
| | | AAACCTAAACTAGTACATGAGACAAACCCAAAACAAGGCTTTGTA | |
| | | TTCTATGACACTCAATTTGGAGACGGTAAAATGCCAGAGGGCTC | |
| | | AGGCCTAGTACCGATATACTACCAAAACAGATGGTATCCTAGAAT | |
| | | AAAGTTTCAGAGTCAAGTAGTGCATGACTTTATACTAACAGGCCC | |
| | | CTTTAGCTACAAAGATGACCTAAAAAGCACAGTACTAACAGTAGA | |
| | | ATACAAGTTCAAATTCTTATGGGGCGGCAATATGATTCCCGAACA | |
| | | GGTTATCAGAAACCCTTGTAAAACAGAAGGACACGATCTCCCTC | |
| | | ACACCAGTAGACTCCATCGCGACTTACAAGTTGTTGACCCACAC | |
| | | ACCGTGGGCCCCCAATGGGCGCTCCACACCTGGGACTGGCGAC | |
| | | GTGGACTCTTTGGTTCAGAGGCTATCAAAAGAGTGTCTGAACAA | |
| | | CAAGTACATGATGAACTGTATTACCCACCTTCAAAGAAACCTCGA | |
| | | TTCCTCCCTCCAATATCAGGCCTCCAAGAGCAAGAAAGAGACTA | |
| | | CAGTTCGCAGGAGGAGAAAGAACAGTCCTCCTCAGAAGAAGAGA | |
| | | CGGACCCGAAGAAAAAAGAGCAAAAACAGCAGCAGCGACTCCA | |
| | | CCTCCAGTTCCAAGAGCAGCAGCGACTCGGAAACCAACTCCGAC | |
| | | TCATCTTCCGAGAGCTACAGAAAACCCAAGCGGGTCTCCACTTA | |
| | | AATCCTATGTTATCAAACCGGCTGTAA | |
| AAK01940.1 | AY026465.1 | ATGGCATGGGGATGGTGGAAGCGACGGCGGCGCTGGTGGTTCC | 175 |
| | | GGAAGCGGTGGACCCGTGGCAGACTTCGCAGACGATGGCCTAG | |
| | | ACCAGCTCGTCGGCGCCCTAGACGACGAAGAGTAAGGAGACGC | |
| | | AGACGATGGAGGAGGGGGCGACCTAGACGCAGACTGTACCGAC | |
| | | GCTACAGACGCAAAAAACGTAGGAGACGAAAGCCCAAAATAATC | |
| | | TTAAAACAATGGCAGCCAGACATTGTAAAGAGGTGCTACATAGT | |
| | | GGGCTACATTCCTGCCATAATATGCGGGGCGGGCACCTGGTCC | |
| | | CACAACTACACCAGCCACCTTCTAGACATTATCCCCAAAGGACC | |
| | | CTTTGGAGGGGGACACAGCACCATGAGATTCTCTCTAAAAGTGC | |
| | | TCTTCGAAGAGCACCTCAGACACCTAAACTTTTGGACACGTAGTA | |
| | | ACCAGGATCTAGAACTTGTAAGATACTTCAGATGCTCCTTTAGGT | |
| | | TTTACAGAGACCAACACACAGACTACTTAGTGCACTACAACAGAA | |
| | | AAACACCCCTGGGAGGCAACAGACTGACAGCACCTAGCCTTCAC | |
| | | CCAGGGGTGCAGATGCTAAGCAAAAACAAAATAATAGTACCCAG | |
| | | CTATGATACTAAACCTAAGGGCAAAAGCTATGTAAAAGTAACTAT | |
| | | AGCACCCCCCACTCTACTAACTGACAAGTGGTACTTTGCTAAAGA | |
| | | CGTTTGTGACACAACCTTGGTTAACTTAGACGTTGTACTCTGCAA | |
| | | CTTGCGGTTTCCGTTCTG CTCACCACAAACTGACAACCCTTGCAT | |
| | | CACTTTCCAAGTTCTCCATTCTATCTATAACGACTTCCTCTCTATA | |
| | | GTAGATACTCAAGAATATAAAAATAATTTTGTTACTACCTTATCTA | |
| | | CAAAACTAGGCACAACATGGGGGTCAAGACTTAACACCTTTAGA | |
| | | ACAGAAGGGTGCTACAGTCACCCAAAACTACCTAAAAAACAGGT | |
| | | TACAGCTGCTAATGACAGTACATACTTTACACAACCAGACGGACT | |
| | | ATGGGGAGATGCAGTTTTCGAGACTAAAGATACTACTATTATTAC | |
| | | CAAAAACATGGAATCATATGCAACATCAGCCAAACAAAGGGGAG | |
| | | TGAACGGAGACCCCGCATTTTGCCATCTTACAGGCATATACTCAC | |
| | | CTCCCTGGCTAACACCAGGAAGAATATCCCCAGAAACCCCAGGA | |
| | | CTTTACACAGACGTGACTTACAACCCATACGCAGACAAAGGAGT | |
| | | GGGAAACCGAATATGGGTAGACTACTGCAGTAAAAAAGGCAATA | |
| | | AATATGACAATACAAGTAAATGCCTTTTAGAAGACATGCCACTAT | |
| | | GGATGGTCACCTTTGGCTACGTAGACTGGGTAAAAAAAGAGACT | |
| | | GGCAACTGGGGCATTCCACTATGGGCCAGAGTACTAATAAGAAG | |
| | | CCCCTACACAGTGCCAAAACTTTACAACGAAGCAGACCCCTCCT | |
| | | ACGGATGGGTTCCTATCTCCTATTATTTTGGAGAAGGAAAAATGC | |
| | | CAAACGGAGACATGTACGTACCCTTCAAAGTTAGAATGAAGTGG | |
| | | TACCCGTCCATGTGGAACCAAGAACCAGTACTAAATGACTTAGC | |
| | | AAAGAGCGGACCGTTTGCATACAAAGACACAAAAACCAGTGTGA | |
| | | CTGTGACTACTAAATACAAATTTACATTTAACTTCGGGGGCAACC | |
| | | CCGTACCCTCACAGATTGTACAAGATCCCTGCACCCAGCCCACC | |
| | | TATGACATCCCCGGCACCGGTAACCTGCCTCGCAGAATACAAGT | |
| | | CATTGACCCGAAAGTCCTCGGTCCCCACTACTCATTCCACCGGT | |
| | | GGGACTTCAGGCGTGGCCTCTTTGGCCAACAAGCTATTAAGAGA | |
| | | GTGTCAGAACAACAAACAACTTCTGAGTTTTTATTCTCAGGTCCA | |
| | | AAGAGACCCAGAATCGATCAAGGGCCTTACATCCCGCCAGAAAA | |
| | | AGGCTCAGATTCACTCCAAAGAGAATCGAGACCGTGGAGCACCT | |
| | | CGGAGAGCGAGGCAGAGACAGAAGCCCCCTCGGAAGAAGAGC | |
| | | CGGAGAACCAAGAAGAGCAAGTACTCCAGTTGCAGCTCCGACA | |
| | | GCAGCTCCGAGAACAGCGAAAACTCAGACAGGGAATCCAGTGC | |
| | | CTCTTCGAGCAACTGATAACAACCCAGCAGGGGGTGCACAAAAA | |
| | | CCCATTGTTAGAGTAG | |
| AAK01942.1 | AY026466.1 | ATGGCCTATGGCTGGTGGGCCCGGAGACGGAGACGCTGGCGC | 176 |
| | | CGCTGGAAGCGCAGGCCCTGGAGACGCCGATGGAGGACCCGC | |
| | | AGACGCAGACCTCGTCGCCGCTATAGACGCCGCAGACATGTAA | |
| | | GGAGACGGAGACGTGGGAGGTGGAGGAGGAGGTACAGAAAAT | |
| | | GGCGCAGAAAAGGCAGGAGAAGGGGCAAAAAAAAGATTATAATA | |
| | | AGACAGTGGCAGCCCAACTACAGGAGACGCTGCAACATAATAGG | |
| | | CTACATGCCCGTGCTTATCTGTGGCAACAATACTGTGTCCAGAAA | |
| | | CTATGCCACACACTCAGATGACTCCTACCTGCCAGGACCCTTTG | |
| | | GAGGGGGCATGACCACTGATAAATTCACCCTAAGAATACTCTAT | |
| | | GATGAGTACTGTAGATTCATGAACTACTGGACAGCCTCTAACGA | |
| | | GGACCTGGACCTCTGCAGATACAGAGGCTGTACTCTGTGGTTCT | |
| | | TCAGACACCCAGATGTAGACTTTATTATCCTTATAAACACCATGT | |
| | | CGCCCTTCCTCGACACCCAGCTCACAGGCCCCAGCATACACCC | |
| | | GGGACTAATGGCCCTTAACAAGAGAGCCAGATGGATCCCCAGC | |
| | | CTAAAAAGCAGACCGGGTAGAAAGCACGTAGTTAAAATTAGAGT | |
| | | AGGCGCTCCCAGAATGTTCACAGATAAATGGTACCCCCAGTCAG | |
| | | ATCTGTGTGACCTCCCCCTACTAACTATCTTTGCCAGTGCAGCG | |
| | | GATATGCAATATCCGTTCGGCTCACCACTAACTGACTCTGTGGTT | |
| | | GTGGGTTTCCAGGTTCTGCAATCCATGTACAATGACTGCCTTAGC | |
| | | ATACTTCCTGAAAATTTTAACGGCAATGGCAAAGGCAAAGCTTTA | |
| | | CATGACAACATAACTAAGTATCTCCCTAACTATAACACTACTCAAA | |
| | | CACTAGCTCAGCTAAAACCGTACATAGATAACACATCCACAGGAA | |
| | | GCACAAATAACTGGAGCAGCTATGTAAATACATCAAAATTTACAA | |
| | | CTGCTTCAAAAACCATTACAACCTCAGCAGAAGGCCCATACTATA | |
| | | CTTTCGCAGATACCTGGTACAGAGGCACTGCATACAACAATAGC | |
| | | ATTACGAACGTTCCTTTACAGGCAGCACAACTATATCACGACACA | |
| | | ACCAAAAAACTACTAGGCACAACATTTACAGGAGGGTCCCCCTA | |
| | | CCTAGAATACCACGGAGGCCTTTACTCCTCCATTTGGCTATCTGC | |
| | | AGGTCGCTCCTACTTTGAAACAAAAGGCACATACACAGATATAAC | |
| | | CTACAACCCTTTTACAGACAGAGGACAAGGTAACATGGTATGGA | |
| | | TAGACTGGGTATCCAAATATGACTCAGTTTACTCTAAAACACAAA | |
| | | GCAAATGCCTTATAGAAAACCTGCCACTGTGGGCATCAGTATAT | |
| | | GGATACGCAGAATACTGCAGCAAATCCACAGGAGACACAAACAT | |
| | | AGAACAAAACTGCAGAGTAGTTATAAGAAGCCCCTTCACTAACCC | |
| | | TCAGCTGCTAGACCATAACAACCCACTAAGAGGGTACGTTCCCT | |
| | | ACTCCATAAACTTTGGCAACGGAAAAATGCCTGGGGGAAGCAGT | |
| | | CAGGTCCCCATAAGAATGAGAAGCAAGTGGTACCCTACTCTATTT | |
| | | CACCAAAAAGAAGTGTTAGAGGCCATAGCGCAGGCGGGCCCCT | |
| | | TCGCGTACCACAGTGATCAGATGAAAGTGTCACTAGGCATGAAA | |
| | | TACGCCTTTAAGTGGGTGTGGGGTGGCAACCCCGTATCCCAACA | |
| | | GGTTGTTAGAAACCCCTGCAAGGACACCGGTGTTTCCTCGGGCA | |
| | | ATAGAGTCCCTCGATCAGTACAAATCGTTGACCCGAAGTACAAC | |
| | | ACTCCAGAACTTGCAATACATGCCTGGGACTTCAGACGTGCCTG | |
| | | TTTGGCCCAAAAGCTATTAAGAGAATGCAAACAGAACCGTACCCT | |
| | | ACTGAACTTCTTTCGCCAGGGCGAAAAAGATACAGGAGAGACAC | |
| | | AGAAGCTCTACTCCCCAGCCAAGAAGAACAACAAAAAGAAAACT | |
| | | TATTTTTCCTCCCAATCAAGCAGCTCCGACCAATCCCCCGTTGGA | |
| | | GGAGTCGGACCAAAGCCAAAGCGAGGAAGAGGGGGTCCAACAA | |
| | | GAGACGCAGACACTCTCCCAGCAGCTCCAGCAGCAGCTCAAGG | |
| | | AGCAGCAGCTCATGGGGGTCCAACTCCGAGCCCTGTACCAACA | |
| | | ATTACAACGGGTCCAACAAAACACACATATCGACCCTACCTTTTT | |
| | | GCAAGGGGGGCGGGCGTAACATCTTTATTTCAAACAGCGTAG | |
| AAK11696.1 | AF345521.1 | ATGGCGTGGTGGGGCAGATGGAGAAGGTGGCCGCGGCGCCGG | 177 |
| | | TGGAGGAGATGGCGGCGCCGCCGTAGAAGGAGACTACCAACAA | |
| | | GAAGAACTCGACGAGCTGTTCGCGGCCTTGGAAGACGACCAAG | |
| | | AAAGACGGTAAGGAGACGCCGGCGCCGACCCAGACGCACTTAC | |
| | | CGACGGGGGTGGCGACGCAGACGGTACATAAGACGCAGGAGG | |
| | | GGACGCAGAAAGAAACTGACTCTGACTATGTGGAACCCCAACAT | |
| | | AGTGAGGAGATGTAACATAGAGGGAGGGCTGCCTCTAATACTGT | |
| | | GTGGAGAAAACAGGGCCGCATTTAACTACGCCTACCACTCAGAG | |
| | | GACTACACAGAGCAGCCATTCCCCTTCGGTGGAGGAATGAGCAC | |
| | | CACCACATTCTCACTGAGAGGCCTCTATGACCAGTACACAAAAC | |
| | | ACATGAACAGATGGACGTTCTCAAACGACCAGCTAGACCTCGCC | |
| | | AGATACAGGGGCTGCAAATTCAGGTTTTACAGACACCCCACCTG | |
| | | TGACTTTATAGTGCACTACAACCTGGTTCCTCCTCTAAAGATGAA | |
| | | CCAGTTCACCAGTCCCAACACGCACCCGGGACTCCTCATGCTGA | |
| | | CTAAACACAAAATAATAATACCCAGCTTCTTAACAAGACCAGGGG | |
| | | GTCGCAGATTCGTAAAGATCAGACTGCCCCCCCCTAAGCTGTTT | |
| | | GAAGACAAGTGGTACACCCAGCAGGACTTGTGCAAACAACCGTT | |
| | | AGTTACTCTAACCGCAACCGCAGCTTCCTTGCGGTATCCGTTCT | |
| | | GCTCACCACAAACGAACAACCCCAACTGTACCTTCCAGGTACTG | |
| | | CGCAAAAATTACCACAAAGTAATAGGTACTTCCTCAACAAACAGT | |
| | | GAGGACGTGACCCCCTTTGAAAACTGGCTATATAATACAGCCTC | |
| | | ACACTATCAAACTTTTGCCACCGAGGCACAAGTTGGTAGAATACC | |
| | | AAGCTTTAACCCAGACGGTACAAAAAATACAAAAGAATCTGAATG | |
| | | GCAAAATTACTGGTCCAAAAAAGGTGAACCATGGAACCCTAATA | |
| | | GTAGTTACCCACATACAACTACAAATCAAATGTACAAAATACCTTT | |
| | | TGACAGCAACTATGGCTTTCCAACTTACAAACCAATAAAAGAATA | |
| | | CATGTTACAAAGAAGAGCATGGAGTTTCAAATATGAAACAGACAA | |
| | | CCCAGTTAGCAAAAAGATCTGGCCACAACCTACCACAACAAAAC | |
| | | CAACAATAGACTACTATGAATACCACGCAGGCTGGTTCAGTAACA | |
| | | TCTTCATAGGCCCCAACAGACACAGCTTACAATTCCAAACAGCAT | |
| | | ACGTAGACACCACATACAACCCACTGAATGACAAAGGAAAGGGC | |
| | | AACAAGATATGGTTTCAGTATCACAGCAAAGTAAACACAGACCTC | |
| | | AGAGACAGAGGCATCTACTGCCTCCTAGAAGACATGCCCCTGTG | |
| | | GTCTATGACCTTTGGATACAGTGACTATGTCAGCACACAGCTAG | |
| | | GCCCAAACGTGGACCACGAGACTCAAGGCCTTGTGTGCATAATA | |
| | | TGCCCGTACACTGAGCCCCCAATGTATGACAAGACCAATCCAAA | |
| | | CAGTGGCTATGTAGCATATGACACAAACTTTGGAAATGGCAAGAT | |
| | | GCCGTCAGGCAGAAGCCAGGTACCCGTGTACTGGCAGTGCAGA | |
| | | TGGAGGCCCATGTTGTGGTTCCAGCAGCAAGTACTGAATGACAT | |
| | | CTCAAAAAGTGGACCGTACGCATACAGAGACGAACTGAAAAACT | |
| | | GTTGCCTGACTGCTTACTACAACTTCATTTTTGACTGGGGGGGC | |
| | | GACATGTATTACCCGCAGGTCATTAAAAACCCCTGCGCAGACAG | |
| | | CGGACTCGTACCCGGTACCAGTAGATTCACTCGAGAAGTACAAG | |
| | | TCGTTAGCCCGCTGTCCATGGGCCCCCAGTACATCCTCCATCTC | |
| | | TTCGACCAAAGACGCGGGTTCTTTAGTTCAAACGCTCTTAAAAGA | |
| | | ATGCAACAACAACAAGAATTTGATGAGTCTTTTACAGTCAAACCT | |
| | | AAGCGACCCAAACTTTCTACAGCCGCCCACGTCGAGCAGCAAGA | |
| | | AGAAGACTCGAGTTCAAGGGAAAGAAAATCGGGGTCCTCACAAG | |
| | | AAGAAGTCCAGGAAGAAGTCCTCCAGACGCCGGAGATCCAGCTT | |
| | | CACCTCCAGCGAAACATCAGAGAACAGCTGCACATCAAGCAGCA | |
| | | GCTCCAACTCCTGTTACTCCAATTATTCAAAACACAAGCAAATAT | |
| | | CCACCTGAACCCACGTTTTATAAGCCCATAA | |
| AAK11698.1 | AF345522.1 | ATGGCGTGGCGCCGGTGGCGATGGCGGCCGTGGTGGAGACGC | 178 |
| | | CGGAGGCGCCGCCGGTGGAGAAGGAGACGGAGGAGACCCAGA | |
| | | CGACGCCGCCCTTATCGACGCCGTCGACCTCGCAGAGTAAGGA | |
| | | GGCGCAGGGGGCGGTGGAGGCGCGCGTACAGACGTTGGGGGC | |
| | | GACGCAGACGCAGACGCAGGCACAAAAAGAAACTTGTACTGACT | |
| | | CAGTGGCAACCAGCAGTAGTTAAGAGGTGCCTAATAGTGGGCTT | |
| | | TGACCCCCTTATAATATGTGGCATTAACAGAACAATATTTAACTAC | |
| | | ACTACACACTCTGAAGACTTTACTTTTAACAACGACAGCTTTGGA | |
| | | GGGGGGCTCTGTACCGCTCAGTACACACTAAGAATCCTTTTCCA | |
| | | AGAAAAGCTGGCCCAGCACAACTTCTGGTCAGCTAGCAACGAAG | |
| | | ACCTAGACCTTGCCAGGTACCTAGGAGCCACAATAGTACTTTAC | |
| | | AGACACCCTACAGTAGACTTCTTAGTTAGAATTCGCACCAGTCCT | |
| | | CCCTTTGAGGACACAGACATGACAGCCATGACACTACATCCAGG | |
| | | CATGATGATGCTAGCTAAAAAGACAATTAAAATTCCCAGTCTTAA | |
| | | AACAAGACCGTCCAGAAAACACGTAGTAAGGATTAGAGTAGGGG | |
| | | CCCCTAAACTATTTGAAGACAAGTGGTACCCCCAGAACGAGCTA | |
| | | TGTGATGTAACTCTGCTAACCATACAGGCAACCACAGCTGATTTC | |
| | | CAATATCCGTTCGGCTCACCACTAACGAACTCCCCCTGTTGCAA | |
| | | CTTCCAGGTTCTTAACAGTAACTATGACAATGCACATTCCATACTT | |
| | | AACTTGTCAAACGAACCAACAAACAAATGGCACACCTATAGAAAT | |
| | | AACTGCTATAAATTTCTACTAGAACAGTACAGCTACTACAACACT | |
| | | AAACAAGTAGTAGCACAACTTAAATATAAATGGAACCCTAATCAA | |
| | | AACCCTACTATGCCAAATACAAGCAATGCATCACTTTCTAAAAAA | |
| | | CCTGATGACCTTACTAAAACCAAAACAACAAACGAGTATCCACAT | |
| | | TGGGACACCCTATATGGTGGTTTAGCATATGGACACAGCACTGT | |
| | | AACACCTGGCACTACCTCATCACCAACAGACCTAAAAACACAAAT | |
| | | GCTTACAGGCAACGAATTTTATACAACAGCAGGCAAAAAGTTAAT | |
| | | AGATACATTTCACCCAATTCCTTACTATGAAAACGGATCTTCTAAA | |
| | | GCCAACACCAACATATTTGACTACTACACAGGCATGTACAGTAGT | |
| | | ATTTTCCTGTCTTCAGGCAGATCAAACCCAGAAGTAAAGGGCAG | |
| | | CTACACAGACATCTCTTACAACCCTCTGACAGACAAGGGAGTAG | |
| | | GTAACATGATTTGGATAGACTGGCTCACTAAAGGAGACACAGTAT | |
| | | ACGACCCCAAAAAAAGCAAGTGCCTACTCTCAGACTTTCCATTGT | |
| | | GGTCACTTTGTTATGGATACCCAGACTACTGCAGAAAACAAACC | |
| | | GGAGACTCAGGTATTTACTATGACTACAGAGTACTTATAAGATGT | |
| | | CCATACACATACCCTCAATTAATAAAACACAACGACAAATACTTT | |
| | | GGCTTCGTAGTGTACAGCGAAAACTTTGGACTGGGGCGACTACC | |
| | | AGGAGGCAACCCTAACCCCCCAACTAGAATGAGACTGCACTGGT | |
| | | ACCCTAATATGTTCCACCAAACAGAAGTACTAGAGTGCATAGCTC | |
| | | AAAGCGGACCGTTTGCTTATCATGGAGACGAGAGAAAAGCTGTT | |
| | | CTGACTGCCAAATACAAGTTCAGATGGAAGTGGGGAGGCAATCC | |
| | | TGTGTTTCAACAGGTTCTCCGAGACCCCTGCACCGGAGGTGCCG | |
| | | TGGCGCCCCACACCAGTCGACACCCTCGTGCAATACAAGTCCAT | |
| | | GACCCGAAGTATCAGGCCCCGGAGTACCTCTTCCACAAATGGGA | |
| | | CTTCAGAAGGGGACTGTTTAGCACTAAAGGTATTAAGAGAGTGT | |
| | | CAGAACAACCAGTACATGATGAGTATTTTACAGGGAGCAGCAAG | |
| | | AGACCCAAGAAAGACACCAACCCAAGCCCCCAAGGAGAAGAGC | |
| | | AAAAAGAAGGCTCGCGTTTCAGAGTCCCAGAGCTCAGACCCTGG | |
| | | CTCCCCTCCAGCCAGGAAACGCAGAGCCAAAGCGAGCAAGAAG | |
| | | AAACAGCCCCGAAAACGGTCCAAGAGCAGCTACAAGAACAACTC | |
| | | CAGCAGCAGCAGCTCATGGGAATCCAGCTCAGAAACGTCTGTCT | |
| | | CCAGCTCGCAAGAGTCCAAGCGGGGCACAGTCTCCACCCCGTT | |
| | | TTCCAATGCCATGCATAA | |
| AAK11704.1 | AF345525.1 | ATGGCATGGGGATGGTGGAGACGAAGGCGCAAGTGGTGGTGGA | 179 |
| | | GACGCCGGTTCGCCCGAAGCAGACTTCGCAGACGACGGATTAG | |
| | | ACGCCCTCGTCGCCGCACTCGACGAAGAACAGTAAGGAGGCGC | |
| | | AGACAATGGAGGAGGGGGCGACCCAGACGCAGACTGTTTAAGA | |
| | | GAAAGAGACGCTTTAAGAGACGCAGACGAAAAGCTAAGATAAAA | |
| | | ATAACTCAGTGGCAGCCTAGCTCAGTGAAGAGATGTTTTGTTATA | |
| | | GGATACTTTCCATTAGTAATATGTGGACCCGGAAGGTGGTCAGA | |
| | | AAACTTTACTAGTCACATAGAAGACAAAATAAGCAAAGGACCCTT | |
| | | TGGGGGAGGGCATAGTACTAGCAGATGGTCCTTAAAAGTACTGT | |
| | | ACGAAGAGTTCCAAAGACACCACAACTTTTGGACAAGAAGCAAC | |
| | | AAAGACCTAGAGTTAGTTAGATTCTTTGGAAGTAGTTGGAGATTT | |
| | | TACAGACACGAGGACACTGACTATATAGTGTACTACTCTAGAAAG | |
| | | GCTCCCCTTGGAGGTAACCTTCTAACAGCACCCAGCCTACACCC | |
| | | AGGAGCAGCCATGCTTAGCAAACACAAAATAGTAGTACCCAGTT | |
| | | TTAAAACCAGACCCGGTGGAAAACCCACCGTTAAAATTAATATTA | |
| | | AACCCCCTACAACACTAATAGACAAATGGTACTTCCAGAAAGACA | |
| | | TTTGTGACACAACCTTCCTTAACTTGAACGTTGTACTCTGCAACC | |
| | | TGCGGTTTCCGTTCTGCTCACCACAAACTGACAACATTTGTGTAA | |
| | | CCTTCCAGATATTGCATGAGGTTTACCACAATTACATAAGCATAA | |
| | | CTGCAAAAGAGTTACTTACAGGCACAGAATGGAGACAGTACTAC | |
| | | AAAAACTTTTTAAACGCAGCACTACCAAATGACAGATCTGTAAAT | |
| | | AAATTAAACACTTTTAGCACAGAAGGAGCCTACAGCCACCCACAA | |
| | | ATAAAAAAACATACAGAAAATATAACAGGTTCAGGAGACAAATAC | |
| | | TTTAGAAAAAAAGATGGACTGTGGGGAGATGCTATTCACATTACA | |
| | | GACCAACAAAACAGAACAGAAGTTATAGACTTAATATTAAAAAAT | |
| | | GCAGAAAACTACCTCAAAAAAGTACAACAGGAATACCAAGGACA | |
| | | GGAAAATTTAAAAAACCTTATACATCCCGTCTTTTGTCAGTACGTA | |
| | | GGCATATTTGGGCAGCCCACTACTAAACTACCACAGAATAAGCC | |
| | | CAGAAATTCCAGGCCTGTACAAAGACATAATATATAA | |
| AAK11708.1 | AF345527.1 | ATGTCCTGGTGGGGATGGCGCCGCCGATGGTGGTGGAAGCCAC | 180 |
| | | GGAGGCGATGGAGACGCAGGAGGGCGCGCCGCCCGAGACGAC | |
| | | TACCGCGACGACGATATAGAAGACCTACTCGCCGCTATCGAGGC | |
| | | AGACGAGTAAGGAGGCGCCGCGCGGGGGGCTGGCGGGGGCG | |
| | | ACGCAGATACTCCCGACGCTATAGCAGACGACTGACTGTCAGAC | |
| | | GAAAGAAAAAGAAACTAACTCTTAAGATCTGGCAGCCACAGAATA | |
| | | TCAGGAGATGTAAGATAAGGGGTCTACTGCCCCTCCTGATATGC | |
| | | GGACACACCCGATCTGCCTTTAACTATGCCATCCACTCGGATGA | |
| | | CAAGACCCCCCAACAGCAGAGTTTCGGGGGTGGGCTCAGCACC | |
| | | GTTAGCTTCTCCCTGAAAGTCCTATTCGACCCGAACCAGAGGGG | |
| | | ACTTAACAGGTGGTCGGCCAGCAACGACCAGCTTGACCTCGCC | |
| | | CGGTACACGGGCTGCACGTTCTGGTTCTACAGACACAAAAAGAC | |
| | | TGACTTTATAGTGCAGTATGATGTCAGCGCCCCCTTCAAACTAGA | |
| | | CAAAAACAGTTGTCCCAGCTACCACCCCTTCATGCTCATGAAGG | |
| | | CCAAACACAAGGTCCTCATCCCCAGTTTTGACACTAAACCCAAAG | |
| | | GCAGAGAAAAGATAAAACTAAGGATACAGCCCCCCAAGATGTTC | |
| | | ATAGATAAGTGGTACACTCAGGAGGACCTATGCCCCGTTATTCTT | |
| | | GTGACACTTGTGGCGACCGCAGCTTCCTTTACACATCCGTTCTG | |
| | | CTCACCACAAACTGCCAACCCTTGCATCACCTTCCAGGTTTTGAA | |
| | | AGAATTCTATTACCAAGCCATGGGGTACGGCACACCAGAAACCA | |
| | | CAATGAGCACAATATGGAACACCCTCTACACAACTAGCACCTACT | |
| | | GGCAGTCACACTTAACCCCACAGTTTGTCAGAATGCCCAAAAAC | |
| | | AATCCTGATAACACTGCGAACACTGAGGCCAATAAGTTTAATGAG | |
| | | TGGGTTGACAAAACGTTTAAAACAGGCAAGTTAGTTAAATACAAC | |
| | | TATAACCAGTATAAACCTGACATAGAGAAACTAACCCTACTAAGA | |
| | | CAATACTACTTTCGATGGGAGACACAGCATACAGGGGTCGCAGT | |
| | | CCCACCTACGTGGACTACCCCCACAACAGACAGATACGAGTACC | |
| | | ACGTAGGCATGTTCAGTCCCATCTTCCTCACCCCTTATAGATCAG | |
| | | CGGGCCTAGACTTTCCGTACGCCTACGCAGACGTCACATACAAT | |
| | | CCCCTCACAGACAAAGGGGTGGGCAACCGCATGTGGTACCAGT | |
| | | ACAACACTAAGATAGACACCCAGTTCGACGCCAAATGCTGTAAG | |
| | | TGCGTCCTAGAGGACATGCCCCTCTATGCCATGGCCTTCGGCCA | |
| | | CGCAGACTTTCTAGAACAGGAGATAGGAGAGTACCAGGACCTAG | |
| | | AGGCCAACGGATACGTGTGTGTTATCAGTCCCTACACCAAGCCC | |
| | | CCCATGTTCAACAAACACAACCCTCAGCAGGGATACGTGTTCTAT | |
| | | GACTCACAGTGGGGCAATGGCAAATGGATAGACGGCACCGGGT | |
| | | TCGTCCCAGTGTACTGGCTGACCAGATGGAGAGTAGAACTGCTA | |
| | | TTTCAAAAGCAAGTACTCTCAGACCTCGCCATGTCAGGGCCCTT | |
| | | CAGCTATCCAGACGAACTTAAGAACACAGTACTGACGGCCAAGT | |
| | | ACAGATTTGACTTTAAGTGGGGTGGCAATCTCTTCCACCAACAGA | |
| | | CCATTAGAAACCCCTGCAAACCCGAAGAGACCTCGACCGGTAGA | |
| | | ATCCCTCGCGATGTACAAGTCGTTGACCCGGTCACCATGGGCCC | |
| | | CCGATTCGTCTTTCACTCCTGGGACTGGAGGAGAGGGTTCCTTA | |
| | | GTGACAGAGCTCTCAAAAGAATGTTTGAGAAACCGCTCGATTTTG | |
| | | AGGGATTTACAGCGACTCCAAAACGACCTCGCATACTCCCTCCC | |
| | | ACAGAGGGACAGCTCGCCCGAGAGCAAAAAGAGCAAGAAGAAA | |
| | | GCTCAGATTCGCAGGAAGAAAGCAGCCTTACCCCGCTCGAAGAA | |
| | | GTCCCGCAAGAGACGAAGCTACGACTCCACCTCAGAAAGCAGCT | |
| | | CCGAGAGCAGCGAAGCATCAGACACCAACTCAGAACCATGTTCC | |
| | | AGCAGCTTGTCAAGACGCAAGCGGGCCTACACCTAAACCCCCTT | |
| | | TTATCTTCCCAGCTGTAA | |
| AAK11710.1 | AF345528.1 | ATGTGGAATCCATCCACAATTAGAGCATGTAACATAAAGGGTGCT | 181 |
| | | ATAAACCTTGTAATGTGCGGACACACTCAGGCAGGCAGAAACTA | |
| | | TGCCATTAGAAGTGAAGACTTTTATCCTCAAATACAAAGCTTTGG | |
| | | TGGGTCATTTAGTACAACTACATGGAGCCTTAGAGTACTGTTTGA | |
| | | TGAATACCAAAAGTTCCACAACTTTTGGACATATCCTAATACTCA | |
| | | GCTAGATCTATGTAGATATAAATATGCTATATTTACCTTTTACAGA | |
| | | GACCCTAAAGTAGACTACATTGTTATATACAACACAAATCCACCA | |
| | | TTTAAAATTAACAAATACAGTAGTCCCTTTTTACACCCCGGACTTA | |
| | | TGATGTTACAAAAAAAAAAAATACTAATACCTAGCTTTCAAACAAA | |
| | | ACCAGGGGGCAAATCTAGAATTAAGGTTAAAATTAAGCCCCCTG | |
| | | CTCTATTTGAAGACAAGTGGTACACTCAACAAGACTTGTGTCCAG | |
| | | TAAACCTGTTGTCACTTGCGGTTTCCGCCTGCAGCTTTATACATC | |
| | | CGTTCTGCTCACCAGAAAGTGACACAATATGCATGACATTTCAGG | |
| | | TATTGCGAGAGTTTTACTACACACACCTAACTGTCACTCCAACCA | |
| | | CAACTACCTCCACACCAGAAAAAGACAAAAAAATATTTAATGACC | |
| | | AATTATACTCCAACGCTAACTTTTATCAATCGCTACACGCATCAG | |
| | | CGTTCTTAAACATTGCTCAGGCACCTGCTATACATGGCCACAATG | |
| | | GAATACCAAACAACAGTAGGTATTTAAGTTCCACAGGTACAGAAA | |
| | | CAAGTTTTAGAACTGGAAACAATAGTATATATGGACAACCAAATT | |
| | | ATAAACCAATTCCAGAGAAATTAACAGAAATAAGAAAGTGGTTTT | |
| | | TCAAACAAGCTACAACACCTAATGAAATTCATGGCACATATGGAA | |
| | | AACCAACATATGATGCAGTAGACTACCACTTAGGCAAATACAGTC | |
| | | CAATATTCTTAAGTCCATACAGAACTAACACACAATTTCCCACTG | |
| | | CATACATGGATGTAACTTATAATCCAAATGTAGATAAAGGAAAAG | |
| | | GCAACAAAATATGGCTTCAATCAGTAACAAAAGAAACATCTGATT | |
| | | TTGACTCACGTAGCTGCAGATGTATAATAGAAAACTTACCCATGT | |
| | | GGGCCATGGTTAACGGGTACTCAGACTTTGCAGAGTCTGAATTA | |
| | | GGATCTGAAGTACACGCTGTATATGTTTGCTGTATTATTTGTCCTT | |
| | | ACACAAAACCTATGCTATATAACAAAACAAACCCAGCAATGGGCT | |
| | | ATATATTTTATGATACTTTATTTGGCGACGGAAAACTACCATCAGG | |
| | | TCCAGGTCTTGTTCCATTTTATTGGCAAAGCAGATGGTATCCAAA | |
| | | ACTAGCTTGGCAACAACAAGTACTACATGATTTTTATTTGTGTGG | |
| | | CCCCTTTAGCTACAAAGATGACCTCAAAAGCTTTACTATAAACAC | |
| | | AACTTACAAGTTTAAATTCTTATGGGGTGGAAATATGATTCCCGA | |
| | | ACAGGTTATCAAAAACCCGTGCAAAACAACAGATCCAACATACAC | |
| | | CCTGTCCGATAGACAGCGTCGCGACCTACAAGTTGTTGACCCAA | |
| | | TTACCATGGGCCCGCAGTGGGAATTCCACACCTGGGACTGGCG | |
| | | ACGCGGACTGTTTGGACAAAATGCTCTTAGAAGAGTGTCAGAAA | |
| | | AACCAGGAGATGATGCAGAGTATTATGCGCCTCCAAAAAAACCT | |
| | | AGATTTTTCCCACCAACAGACCTCGAAGAGCAAGAAAAAGACTC | |
| | | AGATTCACAGGAGGAGACGAGACTCCTATTCCACCCGTCGCCGC | |
| | | CAAGGAGCCAAGAAGAGATCCAGCAAGAGCAGCAGCGAGACAT | |
| | | CCACCTCAGACTCGGACAACAACTCAGAATCAGACAGCAGCTCC | |
| | | AGCAAGTGTTCTTACAAGTCCTCAAAACGCAAGCGAACCTCCAC | |
| | | ATAAATCCATTATTCTTAAACCAACAATAA | |
| AAK11712.1 | AF345529.1 | ATGGCATGGGGATGGTGGAGACGGTGGCGCCGGTGGCCCACC | 182 |
| | | AGACGCTGGAGGAGACGCCGTCGCCGGCGCCCCGTACGGAGA | |
| | | ACAAGAGCTCGCCGACCTGCTCGACGCTATAGAAGACGACGAA | |
| | | CAGTAAGAACCAGGCGGAGGCGGTGGGGGCGCAGACGGTACA | |
| | | GACGGGGCTGGAGACGAAGGACTTATGTAAGGAAGGGGCGACA | |
| | | CAGAAAAAAGAAAAAGAGACTCGTACTGAGACAGTGGCAGCCAG | |
| | | CCACCAGACGCAGATGCACTATAACTGGGTACCTGCCCATAGTG | |
| | | TTCTGCGGACACACTAAGGGCAATAAAAACTATGCACTACACTCT | |
| | | GACGACTACACCCCCCAAGGACAGCCATTTGGAGGGGCCCTTA | |
| | | GCACTACCTCTTTCTCCCTAAAAGTGTTGTATGACCAGCACCAGA | |
| | | GGGGACTAAACAAGTGGTCTTTTCCCAACGACCAGCTAGACCTT | |
| | | GCCAGATACAGAGGCTGCAAATTCTACTTCTATAGAACCAAACAG | |
| | | ACTGACTGGGTGGGCCAGTATGACATATCAGAACCCTACAAGCT | |
| | | AGACAAGTACAGCTGCCCTAACTACCACCCGGGAAACATGATTA | |
| | | AGGCAAAGCACAAATTTTTAATTCCAAGCTATGATACTAATCCCA | |
| | | GAGGGAGACAAAAAATTATAGTTAAAATTCCCCCCCCAGACCTTT | |
| | | TTGTAGACAAGTGGTACACTCAGGAAGACCTGTGTGACGTTAAT | |
| | | CTTGTGTCATTTGCGGTTTCTGCGGCTTCCTTTCTCCACCCATTC | |
| | | GGCTCACCACAAACTGACAACCCTTGCTACACCTTCCAGGTGTT | |
| | | GAAAGAATTCTACTATCAGGCAATAGGCTTTAGTGCAACAGAGG | |
| | | AAAAAATACAAAATGTTTTTAACATATTATACGAAAACAACTCATA | |
| | | CTGGGAATCAAACATAACTCCCTTTTATGTAATTAATGTTAAAAAA | |
| | | GGGTCTAACACAGCACAGTACATGTCACCTCAAATTTCAGACGC | |
| | | AGATTTTAGAAATAAAGTAAATACTAACTACAACTGGTATACCTAC | |
| | | AATGCCAAAACCCATAAAGAAAAATTAAAAACGCTAAGACAAGCA | |
| | | TACTTTAAACAATTAACCTCTGAAGGTCCGCAACACACATCCTCT | |
| | | CACGCAGGCTACGCCACTCAGTGGACCACCCCCAGCACAGACG | |
| | | CCTACGAATACCACCTAGGCATGTTTAGTACCATCTTTCTAGCCC | |
| | | CAGACAGACCAGTACCTCGCTTTCCCTGCGCCTACCAAGATGTC | |
| | | ACCTACAATGCCTTAATGGACAAAGGGGTGGGCAACCACGTGTG | |
| | | GTTTCAGTACAACACAAAGGCAGACACTCAACTAATACTCACCG | |
| | | GAGGGTCCTGCAAAGCACACATAGAAAACATACCCCTGTGGGCA | |
| | | GCCTTCTATGGCTACAGCGACTTCATAGAGTCAGAGCTAGGCCC | |
| | | CTTTGTAGACGCAGAGACAGTAGGCCTTATATGTGTAATCTGCCC | |
| | | CTACACTAAACCCCCCATGTACAACAAGACAAATCCCATGATGG | |
| | | GGTACGTGTTTTATGACAGAAATTTTGGTGACGGCAAATGGACTG | |
| | | ACGGACGGGGCAAAATAGAGCCCTACTGGCAGGTTAGGTGGAG | |
| | | GCCAGAAATGCTTTTTCAAGAGACTGTAATGGCAGACATAGTTCA | |
| | | AACCGGGCCCTTTAGCTACAAGGACGAACTTAAAAACAGCACAC | |
| | | TAGTGTGCAAATACAAATTCTATTTCACCTGGGGAGGTAACGTGA | |
| | | TGTTCCAACAGACGATCAAAAACCCATGCAAGACGGACGAACAA | |
| | | CCCACCGACTCCGGTAGACACCCTAGAGGAATACAAGTGGCGG | |
| | | ACCCGGAACAAATGGGACCCCGTTGGGTGTTCCACTCCTTTGAC | |
| | | TGGCGAAGGGGCTATCTTAGCGAGAAAGCTCTCAAACGCCTGCA | |
| | | AGAAAAACCTCTTGACTATGACGAATATTTTACACAACCAAAAAG | |
| | | ACCTAGAATGTTTCCTCCAACAGAATCAGCAGAAGGAGAGTTCC | |
| | | GAGAGCCCGAAAAAGGCTCGTATTCAGAGGAAGAAAGGTCGCA | |
| | | AGCCTCTGCCGAAGAGCAGACGAAAGAGGCGACAGTACTTCTC | |
| | | CTTAAACGACGACTCAGAGAGCAACAGCAGCTCCAGCAGCAGCT | |
| | | CCAATTTCTCACCCGAGAAATGTTCAAAACGCAAGCGGGTCTCC | |
| | | ACCTAAACCCTATGTTATTAAACCAGCGGTGA | |
| AAK54731.1 | AF371370.1 | ATGCGCTTTTCCAGAATCTACAGGCCAAAGAAAGGGCCACTGCC | 183 |
| | | ACTGCCTCTGGTGCGAGCAGAACAGAAAAAACAGCCTAGTGATA | |
| | | TGAGTTGGCGCCCTCCGCTTCACAATGGGGCAGGAATCGAGCG | |
| | | TCAGTTTTTCGAAGGCTGCTTTCGATTCCACGCTAGTTGTTGCGG | |
| | | CTGTGGCAATTTTGTTACTCATATTACTCTACTGGCTGCTCGCTA | |
| | | TGGTTTTACTGGGGGGCCGACGCCGCCAGGTGGTCCTGGGGCG | |
| | | CTACCCTCGCTAAGGAGAGCGCTGCCACCTCCTCCGGCCCCCC | |
| | | AAGACCAGGCTGAACCAGAGCTATGGCGTGGTCGTGGTGGTGG | |
| | | AGGCGAAGGAAACGCTGGTGGCCGCGCAGAAGGAGGCGATGG | |
| | | AGAAGGCTACGAACCCGAAGAACTGGAAGAGCTGTTCCGCGCC | |
| | | GCCGCCGCCGACGACGAGTAA | |
| BAB69916.1 | AB060596.1 | ATGGCGTTCCGGTGGTGGTGGTGGAGACGCCGCCCGCAGCGAC | 184 |
| | | GATGGACCCGGCGCCGATGGAGGAGACTACGAACCCGCCGACC | |
| | | TAGACGCACTGTACGACGCCGTCGCCGCAGACCAAGAGTAAGG | |
| | | AGAAGGCGGTGGGGCAGGAGACGTGGGCGACGCAGACTGTAC | |
| | | AGACGCACATATAGAAAAAGGCGCAAAAGACGAAAAAAAATGAC | |
| | | CTTAAAAATGTGGAATCCATCCACAATTCGCGCCTGTAACATTAG | |
| | | GGGCTTCATAGCACTAGTAGTCTGTGGACACACTCGTGCAGGCT | |
| | | GTAACTATGCCATACACAGCGAAGACTACATACCTCAACTAAGAC | |
| | | CCTACGGAGGGTCTTTCAGCACTACTACTTGGAGTCTAAAACTAC | |
| | | TATTTGACGAATATCTGAAATTTAGAAACAAATGGAGCTACCCCA | |
| | | ACACAGAACTAAACCTTGCTAGATACAGGGGAGCCACATTTACAT | |
| | | TTTACAGAGACCCCAAAGTAGACTATATAGTAGTATACAACACAG | |
| | | TACCTCCATTTAAACTTAACAAATACAGCTGCCCCATGCTGCACC | |
| | | CAGGTATGATGATGCAGTACAAAAAGAAAGTTTTAATACCAAGCT | |
| | | ATCAGACAAAACCAAAGGGAAAAGCCAAAATAAGACTTAGAATAA | |
| | | AACCTCCAGTTTTATTTGAAGACAAATGGTACACCCAGCAAGACC | |
| | | TGTGTCCCGTTAATCTTTTGTCACTTGCGGTTAGCGCATGTTCCT | |
| | | TCCTGCATCCGTTTATACCACCAGAAAGTGACAACATATGCATAA | |
| | | CGTTCCAGGTGTTGCGAGACTTTTATTACACACAAATGTCAGTTA | |
| | | CACCCACAACAACCACTTCCCTAAATCAGAAAGATGAAAAAATAT | |
| | | TTAGTGACCACTTATATAAAAACCCTGAATACTGGCAATCACATC | |
| | | ACACAGCTGCTAGACTATCTACCTCTCAAAAACCTGCACTACGAA | |
| | | ATAAAGAAGAAATACCTAATGATCACGGATACTTAAACACAACAC | |
| | | CAACTGACAGTACTTTTAGAACTGGAAACAATACAATATATGGCC | |
| | | AACCAAGCTACAGACCAAACTATACCAAACTAACTAAGATTAGAG | |
| | | AATGGTACTTTACACAAGAAAACACAGACAACCCAATACATGGCA | |
| | | GCTACTTAAAACCAACACTAAACTCTGTAGACTACCACCTAGGAA | |
| | | AATACAGTGCTATATTCTTAAGTCCCTATAGAACAAACACTCAATT | |
| | | TGATACAGCATACCAAGATGTAACCTACAATCCTAACACAGACAA | |
| | | AGGCAAAGGCAATAAAATATGGATTCAGAGCTGTACAAAAGAATC | |
| | | CACCATACTAGACAACGCATGCAGATGTGTAATAGAAGACATGC | |
| | | CATTATGGGCTATGGTAAATGGCTACTTAGAATTCTGTGACTCAG | |
| | | AGCTTCCAGGAGCCAACATCTACAATACATACATAGTAGTTGTTA | |
| | | TATGCCCTTACACCAAACCTCAACTACTAAACAAAACTAATCCAA | |
| | | AACAAGGCTATGTATTTTATGACACTCTATTTGGAGACGGAAAAA | |
| | | TGCCCACAGGAACAGGCCTAGTACCGTTCTGGCTGCAGAGCAG | |
| | | ATGGTACCCCAGAGCAGAGTTCCAACAACAAGTACTACATGACC | |
| | | TTTACCTTACAGGCCCATTTAGCTACAAAGATGACCTAAAATCCT | |
| | | TTAGCTTTAATGCTAAATACAAATTCTCATTCTTATGGGGCGGCA | |
| | | ATATGATTCCCCAACAGATTATCAAAAACCCGTGTAAAAAAGAAG | |
| | | AATCCACATTCACCTATCCCAGTAGAGAGCCTCGCGACCTACAA | |
| | | GTTGTTGACCCACTCACCATGGGCCCAGAATGGGTCTTCCACAC | |
| | | ATGGGACTGGAGACGTGGACTTTTTGGTAAAAATGCTGTCGACA | |
| | | GAGTGTCAAAAAAACCAGACGATGATGCAGAATATTATCCAGTAC | |
| | | CAAAAAGGCCTCGATTCTTCCCTCCAACAGACACACAGTCAGAG | |
| | | CCAGAAAAAGACTTCGGTTTCACACCGGAGAGCCAAGAGTTACA | |
| | | GCAAGAAGACTTACGAGCACCCCAAGAAGAAAGCCAAGAGGTAC | |
| | | AGCAGCAGCGACTGCTCCAGCTCAGACTCTCACAGCAGTTCAGA | |
| | | CTCAGACAGCAGCTCCAGCACCTGTTCGTACAAGTCCTCAAAAC | |
| | | CCAAGCAGGTCTCCACATAAACCCATTATTTTTAAACCATGCATA | |
| | | A | |
| BAB69900.1 | AB060592.1 | ATGGCGTGGACCTGGTGGTGGCAGAGGAGGCGCCGAAGGTGG | 185 |
| | | CCGTGGAGAAGGAGAAGGTGGAGAAGACTACGCACCAGAAGAC | |
| | | CTAGACGACTTGTTCGCCGCCGTCGCAAGAGATACAGAGTAAGG | |
| | | AGACGGAGGCGGTGGGGAAGGAGACGTGGGCGACGCACATAC | |
| | | CTTAGACGCAGACTTAAAAAAAGAAAGAGACGCAAAAAGCTAAG | |
| | | ACTGACTCAATGGAACCCTAGCACAATTAGAGGATGTACAATTAA | |
| | | GGGAATGGCTCCCCTAATTATCTGTGGCCACACTATGGCAGGCA | |
| | | ATAACTTTGCCATCCGAATGGAGGACTATGTCTCTCAAATTAGAC | |
| | | CATTCGGAGGGTCGTTTAGCACCACAACCTGGAGCCTTAAAGTA | |
| | | CTTTGGGACGAGCACACCAGATTCCATAACACCTGGAGCTACCC | |
| | | AAACACTCAGCTAGATCTCGCAAGGTTTAAAGGAGTAAACTTTTA | |
| | | CTTCTACAGAGACAAAGACACAGACTTTATAGTAACATACAGCTC | |
| | | AGTCCCGCCATTTAAAATGGACAAATACTCATCAGCCATGCTACA | |
| | | TCCAGGCACGCTCATGCAGAGAAAGAAAAAGATATTAATACCCA | |
| | | GCTTTACAACAAGACCAAGGGGCCGAAAAAAAGTTAAACTGCAT | |
| | | ATAAAACCTCCTGTTTTATTTGAAGACAAATGGTACACCCAGCAG | |
| | | GACCTCTGCGACGTTAATCTTTTGTCACTTGCGGTTTCTGCGGCT | |
| | | TCCTTTAGACATCCGTTCTGCCCACCACAAACTGACAACATTTGC | |
| | | ATCACTTTCCAGGTGTTGAAAGACTTCTATTACACACAAATGTCA | |
| | | GTTACACCGGACACAGCAGGCCAAGAAAAAGACATTGAAATATT | |
| | | TGAAAAACACTTATTTAAAAATCCACAATTCTATCAAACTGTCCAC | |
| | | ACACAAGGAATAATTAGCAAAACACGAAGAACAGCTAAATTTTCA | |
| | | ACCTCAAATAATACCCTAGGAAGTGACACGAATATAACGCCATAC | |
| | | CTAGAACAACCAACAGCAACAAACCACAAAAACACATTATCCACA | |
| | | GGTAACAACTCAATATATGGCCTTCCATCTTACAACCCAATACCA | |
| | | GATAAACTTAAAAAAATTCAAGAATGGTTTTGGAAACAAGAAACT | |
| | | GACAAAGAAAATTTAGTTACTGGCTCCTATCAAACACCTACTAAC | |
| | | AAATCAGTAAGCTACCATCTAGGAAAATACAGCCCCATATTTTTA | |
| | | AGCTCATATAGAACTAATCTACAGTTTATAACTGCATACACAGAT | |
| | | GTAACATACAATCCCCTAAATGACAAAGGAAAAGGCAACCAAATA | |
| | | TGGGTACAGTATGTAACAAAACCAGATACTATATTTAATGAAAGA | |
| | | CAGTGCAAATGCCACATAGTAGATATTCCTTTGTGGGCAGCATTC | |
| | | CATGGCTATATTGACTTTATACAAAGTGAACTAGGCATACAAGAA | |
| | | GAAATACTAAACATTGCCATAATAGTAGTTATATGTCCATACACAA | |
| | | AACCCAAACTAGTACACGACCCACCAAACCAAAACCAAGGCTTT | |
| | | GTATTCTATGACACACAATTTGGAGACGGTAAAATGCCAGAGGG | |
| | | CTCGGGCCTAGTACCCATATACTACCAAAACAGATGGTATCCTA | |
| | | GAATAAAGTTCCAGAGTCAAGTAGTGCATGACTTTATACTAACAG | |
| | | GCCCCTTTAGCTACAAAGATGATCTAAAGAGCACAGTACTAACAG | |
| | | TAGAATACAAGTTTAAATTCTTATGGGGCGGCAATATGATTCCCG | |
| | | AACAGGTTATCAGAAACCCTTGTAAAACAGAAGGACACGATCTC | |
| | | CCTCACACCAGTAGACTCCATCGCGACTTACAAGTTGTTGACCC | |
| | | ACACACCGTGGGCCCCCAATGGGCGCTCCACACCTGGGACTGG | |
| | | CGACGTGGACTCTTTGGTTCAGAGGCTATCAAAAGAGTGTCTGA | |
| | | ACAACAAGTACATGATGAACTGTATTACCCAGCTTCAAAGAAACC | |
| | | TCGATTCCTCCCTCCAATATCAGGCCTCCAAGAGCAAGAAAGAG | |
| | | ACTACAGTTCGCAGGAGGAAAAAGACCAGTCCTCCTCAGAAGAA | |
| | | GAGAAGGACCCGAAGAAAAAAGAGCAAAAACAGCAGCAGCGAC | |
| | | TCCACCTCCAGTTCCAAGAGCAGCAGCGACTCGGAAACCAACTC | |
| | | CGACTCATCTTCCGAGAGCTACAGAAAACCCAAGCGGGTCTCCA | |
| | | CATAAATCCTATGTTATCAAACCGGCTATAA | |
| BAB69904.1 | AB060593.1 | ATGGCCTGGAGATGGTGGTGGAGACGGCGCTGGAAGCCAAGAA | 186 |
| | | GGCGGCCAGCGTGGACCAAGTACCGCAGACGCAGGTGGAGAC | |
| | | GACTTCGACCCCGCAGACCTAGAAGACTTGCTCGCGGCCGTCG | |
| | | AAGAAGACGAACAGTAAGGAGGCGGAGGGTCAGGAGACTCAGA | |
| | | CGGAGGAGGGGGTGGACTAGGAGACGGTACTTGAGACGCAGAA | |
| | | AGAGACGAAAGCTAATACTGACTCAGTGGAACCCCAATATTGTC | |
| | | AGACGATGCTCTATAAAGGGTATAATCCCCCTCACAATGTGCGG | |
| | | CGCTAACACCGCCAGTTTTAACTATGGGATGCACAGCGACGACA | |
| | | GCACCCCTCAGCCAGAGAAATTTGGGGGAGGCATGAGCACAGT | |
| | | GACCTTTAGCCTGTATGTACTGTATGACCAGTTCACTAGACACAT | |
| | | GAACCGGTGGTCTTATTCCAACGACCAGCTAGACCTGGCCAGAT | |
| | | ACAGGGGCTGCTCATTCAAACTGTACAGAAACCCCACAACTGAC | |
| | | TTTATAGTGCAGTATGACAATAATCCTCCTATGAAAAACACTATAC | |
| | | TGAGCTCACCTAACACTCACCCAGGTATGCTCATGCAGCAGAAA | |
| | | CACAGGATACTAGTGCCCAGCTGGCAGACCTTTCCCAGGGGGA | |
| | | GAAAATATGTTAAAGTTAAGATACCCCCACCTAAACTCTTTGAGG | |
| | | ACCACTGGTACACTCAGCCAGACTTATGCAAAGTTCCGCTCGTTA | |
| | | CTCTGCGGTCAACCGCAGCTGACTTCAGACATCCGTTCTGCTCA | |
| | | CCACAAACGAACAACCCTTGCACCACCTTCCAGGTGTTGCGAGA | |
| | | GAACTATAACGAAGTCCTAGGACTTCCCTATGCTAACACCGGGT | |
| | | CTAACAATGAAGTCAAAATTAAAATTGATAACTTTGAAAACTGGCT | |
| | | TTATAACTCCAGTGTACACTATCAAACATTCCAAACAGAGCAAAT | |
| | | GTTCAGACCCAAACAATACAATGCAGATGGCTCTACCTGGAAAG | |
| | | ACTACAAAAGCATGTTATCTACATGGACATCACAAATATATAACAA | |
| | | GAAAACAGACAGCAACTATGGGTATGCCTCCTATGACTTTAGTAA | |
| | | AGGTAAAGAGTTTGCTACACAAATGAGACAGCATTACTGGGTAC | |
| | | AACTAACACAACTAACAGCCACAGTCCCACACATAGGACCTACTT | |
| | | ACAGCAACACAACCACACCAGAATACGAATATCACGCAGGCTGG | |
| | | TACTCTCCAGTGTTCATAGGCCCCAACAGACACAACATACAGTTC | |
| | | AGAACAGCATACATGGACGTTACCTACAACCCACTAAATGACAAA | |
| | | GGCCAGTTTAACAGAGTATGGTTCCAGTACAGCACTAAACCCAC | |
| | | CACAGACTTCAACAACACACAGTGCAAATGTGTTCTAGAAAACAT | |
| | | TCCACTGTGGTCAGCCCTATTTGGATACTCTGAATATGTAGAGAG | |
| | | CCAGCTAGGCCCCTTCCAGGACCACGGGACCGTGGGTGTAGTA | |
| | | GTAGTACAATGTCCTTACACAGTGCCACCCATGTATAACAAAGAG | |
| | | AAACCAGACATGGGCTACGTATTCTATGACACACATTTTGGCAAT | |
| | | GGCAAATTGGGCAACGGCAGCGGCCAGGTACCCAGGTACTGGC | |
| | | AGATGAGATGGTACCCCATACTCAAAAGACAAAAACAAGTAATGA | |
| | | ATGACATTTGCAAGACTGGACCGTTCAGCTACAGAGACGAACTG | |
| | | CTTCAGGTGGACTTAGCAAGCCCCTACACCTTCAGATTTAACTGG | |
| | | GGGGGCGACTTACTCTACCACCAGGTCATCAAAGACCCGTGCA | |
| | | GCTCCTCAGGACTGGCACCTACCGACTCCAGTAGATTCAAGCGG | |
| | | GATGTACAAGTCGTTAGCCCGCTCACAATGGGGCCCCGACTGCT | |
| | | ATTCCACTCGTTCGACCAAAGACGAGGGTTCTTTACTCCAGGAG | |
| | | CTATCAAACGAATGCATGATGAACAAATTAATGTTCCAGACTTTA | |
| | | CACAAAAACCTAAAATCCCGCGAATTTTCCCACCAGTCGAGCTC | |
| | | CGAGAAAGAGCAGAAGCCGAAGAAGACTCAGGTTCGGAAAAAG | |
| | | CGTCGTTCACCTCGTCGCAAGAGAGAGAAGCCGAAGCCCAAGA | |
| | | AAAGTTACCGATACAGCTCCAGCTCAGACAGCAGCTCAGACAAC | |
| | | AACAGCAGCTCCGAGTCCACTTGCAGCAAGTCTTCCTCCAACTC | |
| | | CAAAAAACGAAGGCACATTTACATATAAACCCACTATTTTTGGCC | |
| | | CAAGGGAACATGTAA | |
| BAB69912.1 | AB060595.1 | ATGGCCTACTCCTACTGGTGGCGCCGCCGGAGGTGGCCGTGGA | 187 |
| | | GAGGCCGATGGAGGCGCTGGAGGCGCCGCAGACGAATACCGC | |
| | | GCCGAAGACCTAGACGACCTGTTCGCCGCTATCGAAGGAGACC | |
| | | AGTAAGGAGAAAGCGTCGGTGGGGGAGGCGAGGGCGACGGCG | |
| | | CCGGTACACTAGACGGTACAGACGCAGACTGACTGTCAGACGAA | |
| | | AGAGAAACAAACTCAGACTGAGCGTATGGCAGCCCCAGAATATC | |
| | | AGATACTGTGCCATAAAAGGCCTCTTTCCCATCCTCATCTGCGG | |
| | | GCACGGAAAGAGCGCCGGCAACTATGCCATCCACTCGGATGAC | |
| | | TTTATCACAAGCAGATTCTCTTTCGGAGGTGGTCTCAGCACGACC | |
| | | TCCTACTCTCTGAAGCTGCTATTCGACCAAAACCTCAGGGGACTA | |
| | | AACAGATGGACCGCTAGCAACGACCAGCTAGACCTAGCTAGGTA | |
| | | CCTGGGGGCCATATTCTGGTTCTACAGAGACCAGAAAACAGACT | |
| | | ACATAGTCCAGTATGACATCTCAGAGCCCTTCAAGATAGACAAAG | |
| | | ACAGCTCCCCTTCCTTCCATCCAGGCATACTGATGAAAAGCAAA | |
| | | CACAAAGTACTGGTACCCAGCTTCCAGACTTGGCCCAAGGGTCG | |
| | | CTCTAAAGTAAAGCTAAAGATAAAGCCCCCCAAGATGTTCGTTGA | |
| | | CAAATGGTACACACAAGAGGATCTCTGTACCGTTACTCTTGTGTC | |
| | | ACTTGTGGTCAGCCTAGCTTCCTTTCAACATCCGTTCTGCCGACC | |
| | | ACTAACTGACAACCCTTGCGTCACCTTCCAAGTTCTGCAAAATTT | |
| | | CTACAACAACGTAATAGGCTACTCCTCATCAGACACACTAGTAGA | |
| | | TAATGTCTTTACGAGTCTGTTATACTCTAAAGCCTCCTTCTGGCA | |
| | | GAGCCATCTGACCCCCTCTTATGTCAAAAAAATTAACAACAACCC | |
| | | CGATGGCAGCTCAATTAGTCAGCGAGTAGGCACAATGCCTGACA | |
| | | TGACGGAGTATAACAAGTGGGTATCCAACACAAATATAGGAACA | |
| | | GGATTCGTAAACTCAAATGTTAGTGTACACTATAATTATTGTCAGT | |
| | | ACAACCCTAACCATACTCATTTAACAACACTGAGACAGTACTACT | |
| | | TCTTTTGGGAAACACACCCAGCAGCGGCCAACAAAACACCTGTA | |
| | | ACACACGTCCCCATCACCACCACAAAACCCACCAAAGACTGGTG | |
| | | GGAGTACAGATTAGGCCTGTTCAGTCCCATCTTCCTATCTCCACT | |
| | | CAGAAGCAGCAACATAGAGTGGCCCTTCGCATACAGAGACATAA | |
| | | TATACAACCCACTCATGGACAAGGGGGTAGGTAACATGATGTGG | |
| | | TACCAGTACAACACAAAACCAGATACCCAGTTCTCCCCCACCTCT | |
| | | TGCAGAGCAGTGCTAGAAGACAAACCCATATGGTCCATGGCATA | |
| | | TGGGTATGCAGACTTTCTGCTGTCCATACTAGGTGAACACGACG | |
| | | ATGTAGACTTCCATGGATTAGTCTGTATCATATGCCCCTACACCA | |
| | | GACCGCCCCTCTTCGACAAGGATAACCCCAAGATGGGCTATGTC | |
| | | TTCTACGATGCTAAATTTGGCAATGGCAAATGGATAGACGGTAC | |
| | | GGGATTCATCCCGGTAGAGTTCCAGAGTAGATGGAAACCAGAGC | |
| | | TGGCCTTCCGGAAAGACGTACTGACTGACTTAGCCATGTCAGGC | |
| | | CCCTTCTCCTACAGCGACGACCTTAAAAACACCACAATCCAGGC | |
| | | CAAGTACAAATTCAAATTCAAATGGGGCGGTAATCTCTCTTACCA | |
| | | CCAGACGATCAGAAACCCGTGCACCTCGGACGGACAGACGCCC | |
| | | ACAACCAGTAGACAGTCTAGAGAGGTACAAATCGTTGACCCGCT | |
| | | CACCATGGGACCCCGATACGTATTCCACTCGTGGGACTGGCGAC | |
| | | GTGGGTGGCTTAATGACAGAACTCTCAAACGCTTGTTCCAAAAA | |
| | | CCGCTCGATTTTGAAGAGTATCCAAAATCTCCAAAGAGACCTAGA | |
| | | ATTTTCCCACCCACAGAGCAGCTCCAAGAAGACCCGCAAGAGCA | |
| | | AGAAAGAGACTCCTCTTCTTCGGAAGAAAGTCTCCCTACATCGTC | |
| | | AGAAGAGACACCGCCAGCCCACCTACTCAGAGTACACCTCAGAA | |
| | | AGCAGCTCCGGCAACAGCGAGACCTCCGAGTCCAGCTCAGAGC | |
| | | CCTGTTCGCCCAAGTCCTCAAAACGCAAGCGGGCCTACACATAA | |
| | | ACCCCCTCTTATTGGCCCCGCAGTAA | |
| BAB79314.1 | AB064596.1 | ACGGCCTGGTGGTGGGGAAGACGGTGGCGACGCCGCCCGTGG | 188 |
| | | GGCCGCTGGCGCCGCCGAAGGCGCGTATGGAGAAGAAGACCTA | |
| | | GAACTGCTGTTCGCCGCCGCCGAGGAAGACGATATGTGAGTAG | |
| | | AAGGCGCCGCTACAGGCGCAGACTCAGACGAAGGGGCAGACG | |
| | | GAGATACAGGGGGCGACGAAAGAAGAGACAGACCCTAGTACTC | |
| | | AAACAATGGCAACCCGACGTTAACAGACTGTGCAGAATCACAGG | |
| | | ATGGCTACCTCTTATAGTTTGTGGCACCGGCAGGGCCCAGGACA | |
| | | ACTTTATAGTACACTCAGAGGACATAACCCCCCGAGGAGCCGCC | |
| | | TACGGGGGCAACCTCACACACATAACATGGTGCTTAGAAGCTAT | |
| | | ATACCAAGAATTCCTCATGCACAGAAACAGATGGTCCAGAAGTAA | |
| | | CCATGACCTGGACCTCTGCAGATACCAAGGAGTAGTTTTTAAGG | |
| | | CCTATAGACACCCCAAAGTTGACTACATACTAGCATACACAAGAA | |
| | | CACCTCCATTTCAAGCAACAGAACTTAGCTACATGTCCTGCCATC | |
| | | CACTACTCATGCTGACAGCAAAACACAGGATAGTAGTAAAGAGC | |
| | | CAAGAGACCAAAAAAGGGGGCAAAAAATATGTAAAATTTAGAATA | |
| | | AAGCCCCCCAGACTAATGTTAAACAAGTGGTACTTCACTCATGAC | |
| | | TTTTGTAAAGTCCCACTATTCAGCATGTGGGCCTCAGCCTGTGAT | |
| | | CTAAGAAATCCCTGGCTAAGAGAGGGAGCCCTAAGCCCCACAGT | |
| | | AGGCTTTTTTGCCTTAAAGCCTGACTTCTACCCTAATTTAAGCATT | |
| | | TTACCAAATGAAGTCAGTCAACAATTCGACTTCTTTTTAAACTCTG | |
| | | CTCACCCACCAAGCATACAATCAGAAAAAGATGTTAGATGGGAAT | |
| | | ATACATACACAAACTTAATGAGGCCTATATACAACCAGACCCCAT | |
| | | CACTAAAGGCCTCCACATATGACTGGCAAAACTATAGCAATCCAA | |
| | | ACAACTATCAAGCATGCCACCAACAATTCATAGCATTTAAAGCAC | |
| | | AAAGATTTGCCAAAATTAAAGCAGAATATCAAACAGTATATCCTA | |
| | | CACTAACAACACAGACACCCCAATCAGAAGCACTAACACAAGAA | |
| | | TTTGGACTATACTCTCCATACTATTTAACACCAACAAGAATCAGC | |
| | | CTAGACTGGCACACAGTATTCCACCACATCAGATACAACCCGAT | |
| | | GGCAGACAAAGGCCTAGGAAACATGATTTGGGTCGACTGGTGTT | |
| | | CCAGAAAAGAAGCCACCTACGACCCCACAAGATCCAAGTGCATG | |
| | | CTAAAAGACCTACCACTATACATGCGCTTCTATGGCTACTGTGAC | |
| | | TGGGTAACTAAATCAATAGGCTCAGAAACAGCCTGGAGAGACAT | |
| | | GAGATTAATGGTGGTCTGCCCTTATACAGAACCCCAACTAATGAA | |
| | | AAAAAATGACAAAACCTGGGGCTATGTAATCTATGGCTACAACTT | |
| | | TGCAAACGGAAACATGCCGTGGTTACAGCCATATATCCCAATCT | |
| | | CGTGGTTTTGCCGTTGGTTCCCTTGCATCACTCACCAACGTGAA | |
| | | GCAATGGAGTCAGTTGTGGCCACAGGACCGTTCATGGTCAGAGA | |
| | | CCAAGACCGCAACAGTTGGGACATAACTATAGGCTACAAATTCTT | |
| | | ATGGAGATGGGGGGGCTCTCCTCTGCCCACTCAGGCAATCGAC | |
| | | GACCCCTGCCAGCAGGGAACCCACCCGCTTCCCGAGCCCGGTA | |
| | | CGTTGCCTAGAATCTTACAAGTCAGCGACCCGACGCAACTCGGA | |
| | | CCGAAAACCATATTCCACCTCTGGGACCAGAGGCGTGGACTTTT | |
| | | TAGCAAAAGAAGTATTGAAAGAATGTCAGAATACAAAGGAACTGA | |
| | | TGACTTATTTTCACCAGGTCGCCCAAAGCGCCCAAAGCTCGACA | |
| | | CACGTCCCGAAGGACTACCAGAGGAGCAAAGAGGAGCTTACAAT | |
| | | TTACTCCAAGCCCTCGAAGACTCAGCCCAGTCGGAAGAAAGCGA | |
| | | CCAAGAAGAAATGCCTCCCCTCGAAGAAGAACAAGTACTCCACG | |
| | | AGCAAAAGAAAGAGGCGCTCCTCCAGCAGCTCCAGCAGCAGAA | |
| | | ACACCACCAGCGAGTCCTCAAGCGAGGCCTCAGACTCCTCCTC | |
| | | GGAGACGTCCTGAAACTCCGCCGGGGTCTACACATAGACCCGG | |
| | | TCCTTACATAG | |
| BAB79318.1 | AB064597.1 | ACGGCGTGGTGGTGGGGACGGTGGCGCCGCCGCTGGCGCCGC | 189 |
| | | AGGCGACCGTGGAGACCGAGACTACGACGAAGAAGAGCTAGAC | |
| | | GAGCTTTTCCGCGCCGCCGCCGAAGACGATTTGTAAGTAGGAGA | |
| | | TGGCGCCGGCCTTACAGGCGCAGGAGGAGACGCGGGCGACGC | |
| | | AGACGCAGACGCAGACGCAGACATAAGCCCACCCTAGTACTCA | |
| | | GACAGTGGCAACCTGACGTTATCAGACACTGTAAGATAACAGGA | |
| | | CGGATGCCCCTCATTATCTGTGGAAAGGGGTCCACCCAGTTCAA | |
| | | CTACATCACCCACGCGGACGACATCACCCCCAGGGGAGCCTCC | |
| | | TACGGGGGCAACTTCACAAACATGACTTTCTCCCTGGAGGCAAT | |
| | | ATACGAACAGTTTCTGTACCACAGAAACAGGTGGTCAGCCTCCA | |
| | | ACCACGACCTCGAACTCTGCAGATACAAGGGTACCACCCTAAAA | |
| | | CTGTACAGGCACCCAGATGTAGACTACATAGTCACCTACAGCAG | |
| | | AACGGGACCCTTTGAGATCAGCCACATGACCTACCTCAGCACTC | |
| | | ACCCCCTTCTCATGCTGCTAAACAAACACCACATAGTGGTGCCC | |
| | | AGCCTAAAGACTAAGCCCAGGGGCAGAAAGGCCATAAAAGTCAG | |
| | | AATAAGACCCCCCAAACTCATGAACAACAAGTGGTACTTCACCA | |
| | | GAGACTTCTGTAACATAGGCCTCTTCCAGCTCTGGGCCACAGGC | |
| | | TTAGAACTCAGAAACCCCTGGCTCAGAATGAGCACCCTGAGCCC | |
| | | CTGCATAGGCTTCAATGTCCTTAAAAACAGCATTTACACAAACCT | |
| | | CAGCAACCTACCTCAGCACAGAGAAGACAGACTTAACATTATTAA | |
| | | CAACACATTACACCCACATGACATAACAGGACCAAACAATAAAAA | |
| | | ATGGCAGTACACATATACCAAACTCATGGCCCCCATTTACTATTC | |
| | | AGCAAACAGGGCCAGCACCTATGACTTACTACGAGAGTATGGCC | |
| | | TCTACAGTCCATACTACCTAAACCCCACAAGGATAAACCTTGACT | |
| | | GGATGACCCCCTACACACACGTCAGGTACAATCCACTAGTAGAC | |
| | | AAGGGCTTCGGAAACAGAATATACATACAGTGGTGCTCAGAGGC | |
| | | AGATGTAAGCTACAACAGGACTAAATCCAAGTGTCTCTTACAAGA | |
| | | CATGCCCCTGTTTTTCATGTGCTATGGCTACATAGACTGGGCAAT | |
| | | TAAAAACACAGGGGTCTCCTCACTAGCGAGAGACGCCAGAATCT | |
| | | GCATCAGGTGTCCCTACACAGAGCCACAGCTGGTGGGCTCCAC | |
| | | AGAAGACATAGGGTTCGTACCCATCACAGAGACCTTCATGAGGG | |
| | | GCGACATGCCGGTACTTGCACCATACATACCGTTGAGCTGGTTT | |
| | | TGCAAGTGGTATCCCAACATAGCTCACCAGAAGGAAGTACTTGA | |
| | | GGCAATCATTTCCTGCAGCCCCTTCATGCCCCGTGACCAGGGCA | |
| | | TGAACGGTTGGGATATTACAATAGGTTACAAAATGGACTTCTTAT | |
| | | GGGGCGGTTCCCCTCTCCCCTCACAGCCAATCGACGACCCCTG | |
| | | CCAGCAGGGAACCCACCCGATTCCCGACCCCGATAAGCACCCT | |
| | | CGCCTCCTACAAGTGTCGAACCCGAAACTGCTCGGACCGAGGA | |
| | | CAGTGTTCCACAAGTGGGACATCAGACGTGGGCAGTTTAGCAAA | |
| | | AGAAGTATTAAAAGAGTGTCAGAATACTCATCGGATGATGAATCT | |
| | | CTTGCGCCAGGTCTCCCATCAAAGCGAAACAAGCTCGACTCGGC | |
| | | CTTCAGAGGAGAAAACCCAGAGCAAAAAGAATGCTATTCTCTCCT | |
| | | CAAAGCACTCGAGGAAGAAGAGACCCCAGAAGAAGAAGAACCA | |
| | | GCACCCCAAGAAAAAGCCCAGAAAGAGGAGCTACTCCACCAGCT | |
| | | CCAGCTCCAGAGACGCCACCAGCGAGTCCTCAGACGAGGGCTC | |
| | | AAGCTCGTCTTTACAGACATCCTCCGACTCCGCCAGGGAGTCCA | |
| | | CTGGAACCCCGAGCTCACATAG | |
| BAB79326.1 | AB064599.1 | ACGGCGTGGTGGAGATACAGACGGAGACCGTGGAGAAGATGGA | 190 |
| | | GGAGACGCCGCTGGGGCCTACGAACCCGAAGACCTAGAAGAAC | |
| | | TTTTCGCCGCCGCCGAGCAAGACGATATGTGAGTAGAGGGCGG | |
| | | CGCCGCCGATACAGGCGCAGACGCAGACGGGGGCGACGCAGA | |
| | | CGGGGACGCAGACGCAGGCACAGAAAGACTCTCATTGTCAGGC | |
| | | AATGGCAACCAGACGTTATAAAGAGATGCTTTATCACAGGGTGG | |
| | | CTGCCCCTCATTATCTGTGGAAACGGACACACCCAATTTAACTTT | |
| | | ATAACTCACATGGATGACATTCCACCCAAGAATGCATCCTACGG | |
| | | GGGCAACTTCACCAACTTGACCTTTAACCTAGCCTGCTTCTATGA | |
| | | CGAATTCATGCACCACAGAAACAGATGGTCAGCCTCTAACCATG | |
| | | ACCTAGAGCTAGTGAGATACATCAGAACCAGCCTTAAACTCTACA | |
| | | GACACGAGTCAGTAGACTATATAGTGTGCTACACCACCACAGGC | |
| | | CCCTTCGAGACAAATGAAATGTCCTACATGCTCACTCACCCTCTG | |
| | | GCCATGCTCCTCAGCAAAAGACACGTAGTTGTGCCTAGCCTAAA | |
| | | AACAAAACCACACGGCAGAAAGTACAAAAAGATAACAATTAAGCC | |
| | | CCCAAAACTGATGCTAAACAAGTGGTACTTTGCTACAGACCTCTG | |
| | | CCACATAGGCCTCTTCCAGCTCTGGGCCACAGGCCTAGAGCTTA | |
| | | GAAATCCATGGCTCAGATCAGGCACAAACAGCCCTGTTATAGGC | |
| | | TTCTATGTCCTTAAAAACCAAGTTTACAAAAACAGATACAGCAAC | |
| | | CTAAACACAACAGAAGCACACAACGCCAGACAAGACGCATGGAA | |
| | | CGAACTAACCCAAACAAAAACTAACGACAAATGGTACAATTGGCA | |
| | | ATATACATACAATAAACTTATGAAGCCAATTTACTATGCAGCTTCA | |
| | | AATGAAAGTAGTAATTCAGCCATGAAAGGAAAAACATATAATTGG | |
| | | AAACATTACAAAGAATATTTTAGCAACACACAAACTAAGTGGAAA | |
| | | ACAATTATTAAAGACGCCTATGACTTAGTAAGAGAGGAATACCAA | |
| | | CAATTATACACCACAACTATGGCATATCCACCACCATGGCAATCA | |
| | | ACCACTTCTAATACAGGCAGACAATACCTAGAACATGACTGTGG | |
| | | CATTTACAGCCCATACTTTCTAACACCACAAATATATAGCCCAGA | |
| | | ATGGCACACAGCCTGGTCCTACATCAGATACAATCCCCTCACAG | |
| | | ACAAAGGCATAGGAAACAGAGTCTGTGTCCAGTACTGCAGCGAG | |
| | | GCCAGCAGCGACTACAACCCAATAAAGAGCAAGTGTATGTTACA | |
| | | AGACATGCCCTTGTGGATGATGCTGTATGGCTACGCAGACTATG | |
| | | TAGTAAAGAGCACAGGCATACAGTCAGCCTGGACAGACATGAGA | |
| | | GTGGCCATCAGATGTCCCTACACAGACCCTAAGCTTGTGGGCAG | |
| | | CACAGAAAACACCATGTTTATCCCCATAGGCCTAGAATTCATGAA | |
| | | CGGAGACATTCCAGACAAAAGGCCCTACATTCCGTTAACCTGGT | |
| | | GGTTTAAGTGGTACCCCATGATTACACACCAGAAAACCGCAATT | |
| | | GAGGCAATAGTTTCCTGCAGCCCCTTCATGCCCAGAGATCAGGA | |
| | | ACAAGCTAGTTGGGACATAACTGTAGGTTACAAAGCAACCTTCTT | |
| | | ATGGGGCGGGTCCCCGTTACCTCCACAGCCCATTGACGACCCC | |
| | | TGCCAAAAAGGAAAACACGACATTCCCGACCCCGATACAAACCC | |
| | | TCCAAGAATACAAATATCAGACCCGCAACACCTCGGACCGGCGA | |
| | | CGCTGTTCCACTCGTGGGACCTCAGACGTGGATATATTAATACAA | |
| | | AAAGTATTAAAAGAATCTCAGAACACCTCGATGCTAATGAATATTT | |
| | | TTCGACAGGCGTCGTGTCCAAAAAACCCCGATTCGACACTCCCC | |
| | | ACCACGGGCAGCTATCAAACCAAGAAGAAGACGCCTTGTCTATC | |
| | | CTCAGACAACCCCAAAAAGAGCAAGAAGAGACCACCTCCGAGGA | |
| | | AGAACAAGCACTCCAAAAAGAAGAGGAGCAAAAAGAAAAGCTCC | |
| | | TACAGCAACTCAGAGTCCAGCGACAGCACCAGCGAGTCCTCAGA | |
| | | CAGGGAATCAAACACCTCATGGGAGACGTCCTCCGACTCAGACA | |
| | | GGGAGTCCACTGGAACCCAGTCCTATAA | |
| BAB79330.1 | AB064600.1 | ACGGCCTGGGGATGGTACCGGAGAAGAAGATGGCGCCCATGGA | 191 |
| | | GAAGGAGAAGGTGGGCGATACGCAGAAGAAGACCTAGAAGAAC | |
| | | TGTTCGCCGCCGCGGCAGAAGACGATATGTGAGTAGATGGCCG | |
| | | CGCCGCCGATACAGGCGCAGACGCAGACGAACCAGACGTAGGG | |
| | | GGGGACGCAAAAGGAGACACAGACAGACTCTTATACTCAGACAG | |
| | | TGGCAACCAGATGTTATGAAAAAATGTTTTATTACTGGCTGGATG | |
| | | CCCCTCATTATATGTGGCACTGGGAACACTCAATTTAACTTTATA | |
| | | ACCCATGAAGACGATGTGCCACCAAAAGGAGCCTCCTATGGAGG | |
| | | CAACCTCACTAACCTCACCTTCACTCTAGAAGGACTGTATGACGA | |
| | | ACACCTACTCCACAGAAACAGGTGGTCCAGATCAAACTTTGATCT | |
| | | AGACCTCAGCAGATACCTCTACACTATAATAAAGCTATACAGACA | |
| | | CGAGTCTGTAGACTACATAGTCACCTACAACAGAACAGGCCCCT | |
| | | TTGAAATAAGCCCACTCAGCTACATGAACACACACCCTATGCTAA | |
| | | TGCTCCTAAACAAGCACCACGTAGTGGTGCCAAGCCCAAAAACA | |
| | | AAGCCCAAAGGCAAGAGGGCCATTAAAATTAAAATAAAGCCACC | |
| | | TAAACTAATGCTAAACAAATGGTACTTTGCAAGAGACACGTGTAG | |
| | | AATAGGCCTCTTTCAGCTCTATGCCACAGGGGCTAACCTAACAA | |
| | | ACCCCTGGCTCAGGTCAGGCACAAACAGCCCTGTAGTGGGATTC | |
| | | TATGTAATTAAAAACTCCATATATCAAGACGCCTTTGATAACCTG | |
| | | GCAGACACAGAACATACAAACCAAAGAAAAAATGTATTTGAAAAC | |
| | | AAACTATATCCCACTACAACAACTAACAAAGACAACTGGCAATAC | |
| | | ACATACACATCCCTCATGAAAAACATATACTTTAAAACAAAACAAG | |
| | | AAGCAGAAAACCAAACAATGAGTAGCACATACAACTTTGACACAT | |
| | | ACAAAACAAACTATGACAAAGTAAGAACTAAATGGATAAAAATAG | |
| | | CTGAAGATGGCTATAAACTAGTATCAAAAGAATACAAAGAAATAT | |
| | | ACATCAGTACAGCCACATACCCTCCACAATGGAATTCAAGAAACT | |
| | | ACCTTAGCCATGACTATGGCATTTATAGTCCTTACTTTTTAACACC | |
| | | CCAAAGATACAGCCCCCAATGGCACACAGCATGGACATATGTCA | |
| | | GATACAACCCACTAACAGACAAAGGCATAGGCAACAGAATATTT | |
| | | GTTCAGTGGTGCTCAGAAAAAAACAGCTCATACAACAGCACAAA | |
| | | AAGCAAGTGCATGCTACAAGACATGCCCCTTTTTATGCTAACCTA | |
| | | TGGGTACCTAGACTATGTACTAAAATGCGCAGGCTCTAAATCAG | |
| | | CCTGGACAGACATGAGAGTCTGTATCAGAAGCCCATACACAGAA | |
| | | CCACAGCTTACAGGCAACACAGATGATATTAGTTTTGTTATAATA | |
| | | TCAGAGGCCTTCATGAACGGGGACATGCCCTACCTAGCTCCACA | |
| | | CATACCCGTTAGTCTGTGGTTTAAGTGGTACCCCATGATATTACA | |
| | | CCAGAAGGCAGCTTTAGAAACCATAGTTTCCTGTGGACCGTTTAT | |
| | | GCCCAGAGACCAGGAAGCCAACTCTTGGGACATAACCGCAGGT | |
| | | TACAAAGCAGTTTTTAAGTGGGGTGGGTCCCCTCTGCCTCCACA | |
| | | GCCTATCGACGACCCCTACCAAAAACCCACCCACGAAATACCCG | |
| | | ACCCCGATAAGCACCCTCCAAGACTACAAATTGCAGACCCGAAA | |
| | | ATCCTCGGACCGTCGACAGTCTTCCACACATGGGACATCAGACG | |
| | | TGGCCTCTTTAGCACAGCAAGTCTTAAGAGAGTGTCAGAATACC | |
| | | AACCGCCTGATGACCTTTTTTCAACAGGCGTCGCATCCAAAAGA | |
| | | CCCCGATTCGACACTCCAGTCCAAGGGCAGCTCGAAAGCCAAG | |
| | | AAGAAGAAAGCTATCGTTTACTCAGAGCACTCCAAAAAGAGCAA | |
| | | GAGACAAGCAGCTCGGAAGAGGAGCAGCCACAAAACCAAGAGA | |
| | | TCCAAGAAAAACTACTCCTCCAGCTCCAGCAGCAGCGACAACAG | |
| | | CAGCGACTCCTCGCAAAGGGAATCAAGCACCTCCTCGGAGATGT | |
| | | CCTCCGACTCCGAAAAGGAGTCCACTGGGACCCGGTCCTTACAT | |
| | | AG | |
| BAB79334.1 | AB064601.1 | ACGGCGTGGTACAGAAGAAGAAGGTGGAGACCGTGGAGAAGAC | 192 |
| | | GCCGCAGACCGTGGACCCTACGCAGAAGAAGAGCTAGAAGATT | |
| | | TGTTCGCCGCCGCCCGAGAAGACGATATGTGAGTAGATGGCGG | |
| | | CGCCGCCGATACAGGCGCAGACTAAGACGGGGGAGACGACGAA | |
| | | GGGGACGCAGACGCAGAAAAGAAACTATAATAGTGAGACAGTG | |
| | | GCAGCCAGATGTAATGAGAAACTGTTATATTACTGGCTTCCTACC | |
| | | TCTCATAGTCTGTGGCTCAGGCAACACTCAATTTAACTTTATCAC | |
| | | ACATGAGAATGACATACCCCCAAGGGGAGCCTCCTATGGGGGC | |
| | | AACCTCACCAACATAACCTTCACCCTAGCGGCACTATATGACCA | |
| | | GTACTTGCTACACAGAAACAGGTGGTCCAGGTCAAACTTTGACC | |
| | | TAGACCTAGCCAGATACATTAACACAAAACTAAAACTATACAGAC | |
| | | ATGACTCAGTAGACTACATAGTAACCTACAACAGAACAGGTCCCT | |
| | | TTGAGGTGAATCCACTAACATACATGCACACTCACCCCCTACTCA | |
| | | TGCTCGTGAACAGGCACCACATAGTGGTGCCCAGTTTAAAAACA | |
| | | AAACCCAGAGGCAAAAGATACATAAAAGTAAAAATAAAGCCTCCA | |
| | | AAACTAATGCTAAACAAGTGGTACTTTGCGAAAGACATCTGCCCA | |
| | | CTAGGCCTCTTCCAGCTATATGCTACCGGCCTAGAACTCAGAAA | |
| | | CCCCTGGATCAGAGAGGGCACAAACAGCCCCATAGTAGGGTTTT | |
| | | ATGTTTTAAAACCCTCACTATATAATGGAGCCATGTCAAACTTAG | |
| | | CAGACACAGAACATTTAAACCAAAGACAAACCCTATTTAACAAAC | |
| | | TACTTCCAACACAAAACCAAAAAGACGAATGGCAATACACATACA | |
| | | ACAAACCAATGCAAAAAATATATTATGAAGCAGCAAACAAGCAAG | |
| | | ATAGTGGCTTTAAAAATACAACATATAACTGGACAAACTACAAAA | |
| | | CTAACTACCAAAAAGTACAATCACAATGGCAAACTGTAGCACAAC | |
| | | AAAACTACAACCAAGTATACAATGAATTTAAAGAGGTATACCCAC | |
| | | TAACAGCTACATGGCCACCGCAATGGAATGCTAGACAATACATG | |
| | | TCACACGACTTTGGCATATACAGCCCATACTTTTTGTCACCTGCA | |
| | | AGATTTACAGACTACTGGCACAGTGCATACACCTATGTCAGATAC | |
| | | AACCCCATGTCAGACAAAGGCATAGGTAACATAATCTGCATACAA | |
| | | TGGTGCAGTGAAAAAAACAGTGAATTTAATGAGACTAAAAACAAG | |
| | | TGCATACTAAGAGACATGCCACTTTACATGCTAACATATGGCTAC | |
| | | CTAGACTATACCACAAAATGCACAGGCTCCAACTCCATCTGGAC | |
| | | AGACGCCAGAGTAGCCATCAGATGTCCATACACAGATCCCCCAC | |
| | | TATCAAATCCAACTAACAAAAACACACTTTATATTCCACTATCTAC | |
| | | ATCTTTCATGCAAGGAGACATGCCCTGGCCAACCACAAACATTC | |
| | | CGTTAAAGATGTGGTTTAAGTGGTATCCCATGATCATGCACCAGA | |
| | | GGGCCTGTTTAGAAACCATAGTTTCCTGTGGACCGTTTATGCCCA | |
| | | GAGACCAAACCGCAAGCAGTTGGGACATAACTATTGCATACAGA | |
| | | GCCTTTTTTAAATGGGGTGGCAATCCTCTGCCTCCACAGCCCAT | |
| | | CGACGACCCCTGCCAAAAAGACACCCACGAAATACCCGACCCC | |
| | | GATAAACACCCTAGAGGAATACAAATATCAGACCCGAAGGTACT | |
| | | CGGACCACCCACAGTCTTCCACACATGGGACATCAGACGTGGAC | |
| | | TGTTTAGCTCGACGAGTCTTAAAAGAGTGTCAGAATACCAACCG | |
| | | CCTGATGACCCTTTTTCAACAGGCGTCGTCTTCAAAAGACCCCG | |
| | | ACTGGAAACCCAGTACAAAGGAACCCAAGAAACCCCAGAAGAAG | |
| | | ACGCCTACACTTTACTCAAAGCACTCCAAAAAGAGCAAGAGAGC | |
| | | AGCAGCTCGGAAGAAGAACTCCCACAAGAAGAGCAAGAGATCCA | |
| | | AAAAACACAACTCCTCAAGCAGCTCCAACTCCAGCAGCAGCAAC | |
| | | AGCGAATCCTCAAGAGGGGAATCAGACACCTCTTCGGAGACGTC | |
| | | CTCCGACTCAGAAAAGGAGTCCACTCCAACCCAGACCTATTATA | |
| | | A | |
| BAB79338.1 | AB064602.1 | ACGGCCTGGTACCGGTACAGAAGAAGGCCATGGCGCCGAAGGA | 193 |
| | | GGCGACCGAGGTGGGGCCTACGCAGAAGAAGATTTAGAAGATC | |
| | | TTTTCGCGGCCGCGGAAGAAGACGATATGTGAGTAGATGGTCGC | |
| | | GCCGCCGATACAGGCGCAGACGGAGAAGGGGGCGACGTAGAC | |
| | | GGGGACGCAGACGAAGAAAGAGACAGACTCTTATACCGAGACA | |
| | | GTGGCAGCCAGATGTTACTAAAAAGTGCTTCATTACTGGCTGGAT | |
| | | GCCCTTAATAATCTGTGGGACTGGACACACACAATTTAACTTTAT | |
| | | AACCCACGAAGAGGATATCCCCGGTGCAGGAGCCTCCTATGGA | |
| | | GGAAACCTTACAAACATTACCATTACTCTGGGAGGGCTATATGAA | |
| | | CAATATATGCTTCACAGAAACCACTGGTCCAGAAGCAACTATGAC | |
| | | CTAGAGCTGGCCAGATACCTAGGCTTCACCCTAAAATGCTACAG | |
| | | ACATGCAACAGTAGACTATATACTTACATACAGCAGAACAACACC | |
| | | CTTTGAGACCAATGAACTGAGCCACATGCTAACTCACCCCTTACT | |
| | | AATGCTACTAAACAAACATCACAGAGTAATACCCAGCTTAAAAAC | |
| | | AAGGCCAAAAGGAAAAAGGTCAGTTAGAATCCACATTAAACCCC | |
| | | CAAAACTAATGATAAACAAATGGTACTTTGCAAAAGACCTCTGTA | |
| | | ACATAGGACCCTGTCAAATATATGCCACAGGCCTAGAACTCTCAA | |
| | | ACCCCTGGCTAAGATCAGGCACAAACAGCCCTGTAATAGGCTTT | |
| | | TGGGTACTTAAAAATCACCTATATGATGGCAACCTCTCAAACATA | |
| | | GCCTCAGGTGAACAATTAACAGCCAGACAAACTCTATTTACAACT | |
| | | AAATTACTCCCAAGTAATAACACCAAAGACGAATGGCAATACGCC | |
| | | TATACCCCACTAATGAAAACATTCTACACACAAGCAGCCAACACA | |
| | | GCAGCACATAACATAACAGACAAAACATACAACTGGAAAAACTAC | |
| | | AAAACTCACTATGACAAAGTACAACAAACATGGACAACAAAAGCA | |
| | | CAATTTAATTATGACTTAGTTAAAGAAGAATACAAAACGGTATATC | |
| | | CAACCACAGCTACATTCCCACCAGAGTGGTCAAACAGACAATAT | |
| | | CTAGAACATGACTATGGCTTATTCAGCCCTTATTTTCTAACACCAA | |
| | | ACAGATACAGCACAGAGTGGCACATGCCAATTACCTATGTTAGAT | |
| | | ACAACCCACTAGCAGACAAAGGCATAGGCAACAGAATATACATG | |
| | | CAGTGGTGCTCAGAAAGCAGCAGCAGCTTTGAGCCCACCAAAAG | |
| | | CAAGTGCATGCTACAAGACATGCCACTATACATGCTCACATATGG | |
| | | ATACCTAGACTATGTTGTTAAATGCACAGGTGTTAAATCAGCCTG | |
| | | GACAGACATGAGAGTGGCCATTAGAAGCCCCTACACCTTTCCTC | |
| | | AACTAATAGGCAGCACAGATAAAGTGGGCTTCATCCCCCTAGGT | |
| | | GAAAAATTCATGAGCGGAGACACAGACCCCGTTAAAAACTTTATA | |
| | | CCGTTAAAGTATTGGTACAGATGGTATCCGTTTGCGGCTAACCAA | |
| | | AAGTCAGTTTTAGAAACCATAGTTTCCTGTGGCCCCTTCATGCCC | |
| | | AGAGATCAGGAAGCAGGCTCTTGGGACATAACTGTAGGTTACAA | |
| | | AGCAACCTTTAAACGGGGGGGCTCCCCTCTACCTCCACAGCCCA | |
| | | TCGACGACCCATGCCAAAAGCCCACCCACGACCTTCCCGACCC | |
| | | CGATAGACACCCCCCAAGAATACAAATCTCGGACCCGGCAAGAC | |
| | | TCGGACCGGAGACGCTCTTCCACTCATGGGACATCAGACGTGG | |
| | | ATACATTAACACAAAAGCTATTAAAAGAATCTCAGATTACACAGAA | |
| | | TCTAATGACTATTTTTCAACAGGCGTCGTGTCAAAAAGACCCCGA | |
| | | TTGGAAACCCAGTACCACGGCCAACACGAAAGCCAAGAAGAAGA | |
| | | CGCCTATCTTTTACTCAAACAACTCCAGGAAGAGCAAGAAACGA | |
| | | GCAGTTCGGAGGGAGAACAAGCACCCCAAGAAAAAACACTCCAA | |
| | | AAAGAAAAGCTCCTCAAGCAGCTGCAGCTCCACAAGCAGCAGCA | |
| | | GCAACTCCTCAGAAAAGGAATCAGACACCTCCTCGGGGACGTCC | |
| | | TCCGACTCAGACGGGGAGTCCACTGGGACCCAGGCCTATAG | |
| BAB79342.1 | AB064603.1 | ACGGCGTGGTGGTGGGGCCGATGGAGACAGCGCCGCTGGGGC | 194 |
| | | CGCCGCCGCCGCAGACCATGGAGGGTACGACGAAGGAGACCTA | |
| | | GAAGATCTTTTCGCCGCCGCCGCCGAGGACGATATGTGAGTAG | |
| | | GCGGAGGCGCCGCCGCTACTACAGGCGCAGACTAAGACGGGG | |
| | | CAGACGCAGAGGGCGACGAAAGAGACACAGACCGACCCTAATA | |
| | | CTGAGGCAGTGGCAACCTGACGTTGTTAAACACTGTAAGATAAC | |
| | | AGGATGGATGCCCCTCATTATCTGTGGCTCTGGCAGCACACAGA | |
| | | TGAACTTTATAACCCACATGGACGATACTCCTCCCATGGGATACA | |
| | | CCTACGGGGGCAACTTTGTAAATGTGACTTTCAGCTTAGAGGCC | |
| | | ATCTATGAACAGTTCCTATATCACAGAAACAGATGGTCCAGATCT | |
| | | AACCATGACTTAGACCTAGCCAGGTACCAAGGAACCACCTTAAA | |
| | | ACTCTACAGACACGCCACAGTAGACTACATACTTTCCTACAACAG | |
| | | GACAGGACCCTTCCAGATCAGTGAGATGACATACATGAGCACTC | |
| | | ACCCAGCAATAATGCTACTAATGAAACACAGAATAGTTGTGCCCA | |
| | | GCCTTAGAACAAAGCCTAAAGGCAGGCGCTCCATAAAAATTAGA | |
| | | ATAAAGCCCCCCAAACTTATGCTAAACAAGTGGTACTTTACCAAA | |
| | | GACATATGCTCCATGGGCCTCTTCCAACTAATGGCCACCGGAGC | |
| | | AGAACTCACTAACCCCTGGCTCAGAGACACCACAAAAAGCCCAG | |
| | | TAATAGGCTTCAGAGTTCTAAAAAACAGTGTTTACACCAACTTAT | |
| | | CTAACCTAAAAGACGTATCCATATCAGGAGAAAGAAAATCCATCT | |
| | | TAAACAAAATTCACCCAGAAACTCTCACAGGATCAGGCAATGCAT | |
| | | CTAAAGGGTGGGAATACTCATACACAAAACTAATGGCGCCCATA | |
| | | TACTATTCAGCAGTTAGAAACAGCACATACAACTGGCAAAACTAC | |
| | | CAAACACACTGCGCAACAACAGCTATCAAATTTAAAGAAAAACAA | |
| | | ACCAGTACTCTAACTCTTATTAAAGCAGAGTACTTATACCACTAC | |
| | | CCAAACAATGTCACACAGGTAGACTTCATAGATGACCCCACACT | |
| | | CACACATGACTTTGGCATATACAGCCCATACTGGATAACACCTAC | |
| | | CAGAATAAGCCTAGACTGGGACACACCATGGACATATGTCAGAT | |
| | | ACAACCCACTCTCAGACAAAGGCATAGGCAACAGAATCTATGCA | |
| | | CAGTGGTGCTCAGAAAAAAGCAGCAAATTAGACACCACAAAGAG | |
| | | CAAATGCATACTAAAAGACTTTCCACTATGGTGCATGGCCTATGG | |
| | | CTACTGTGACTGGGTAGTAAAATGTACAGGAGTGTCCAGTGCAT | |
| | | GGACAGACATGAGAGTAGCCATCATCTGCCCGTACACAGAACCG | |
| | | GCACTTATAGGGTCAGATGAAAATGTAGGCTTTATTCCAGTAAGT | |
| | | GACACCTTTTGCAACGGAGACATGCCGTTTCTTGCACCATACATC | |
| | | CCTATTACATGGTGGATCAAGTGGTACCCCATGATTACACACCAA | |
| | | AAGGAAGTTCTTGAGGCAATAGTAAACTGTGGACCGTTTGTCCC | |
| | | CCGAGACCAAAGTTCCCCAGCTTGGGAAATCACCATGGGTTACA | |
| | | AAATGGATTGGAAATGGGGCGGCTCTCCCCTGCCTTCACAGGCA | |
| | | ATCGACGACCCCTGCCAGAAGCCCACCCATGAGCTACCCGATC | |
| | | CCGATAGACACCCTCGCATGTTACAAGTCTCTGACCCGACAAAG | |
| | | CTCGGACCGAAGACAGTGTTCCACAAATGGGACTGGAGACGTG | |
| | | GGCAACTTAGCAAAAGAAGTATTAAAAGAGTCCAAGAAGACTCAA | |
| | | CGGATGATGAATATGTTACAGGGCCTTTATCAAGAAAAAGAAACA | |
| | | AGCTCGACACAAAGATGCCAGGCCCCCCAACCCCCGAAAAAGA | |
| | | AAGCTACACTTTACTCCAAGCCCTCCAAGAGTCGGGCCAGGAGA | |
| | | GCAGCTCCCAGGACGAAGAACAAGCACCCCAAAAAGAAGAGAA | |
| | | CCAGAAAGAAGCGCTCGTGGAGCAGCTCCAGCTCCAGAAACAG | |
| | | CACCAGCGAGTCCTCAAGCGAGGCCTCAAACTCCTCTTGGGAGA | |
| | | CGTCCTCCGACTCCGCCGCGGAGTCCACTGGGACCCCCTCCTA | |
| | | TCCTAA | |
| BAB79346.1 | AB064604.1 | ATGGCATGGGGATGGTGGAAACGAAAGCGGCGCTGGTGGTGGA | 195 |
| | | GAAAGCGGTGGACCCGTGGCCGACTTCGCAGACGATGGCCTAG | |
| | | ACGATCTCGTCGCCGCCCTCGACGAAGAAGAGTAAGGAGGCGG | |
| | | AGGAGGTGGAGGAGAGGGCGACCGAGACGCAGACTGTACAGA | |
| | | CGCGGGAGACGGTACAGACGAAAACGGAAGAGGGCTAAGATAA | |
| | | CTATAAGACAATGGCAGCCAGCCATGACGAGACGCTGTTTTATA | |
| | | AGGGGACACATGCCCGCTTTAATATGTGGCTGGGGGGCGTACG | |
| | | CCAGCAACTACACCAGCCACCTGGAGGACAAAATAGTTAAAGGA | |
| | | CCCTACGGAGGGGGACACGCCACTTTTAGATTCTCCCTACAAGT | |
| | | ACTGTGCGAGGAGCATCTAAAACACCACAATTACTGGACTAGAA | |
| | | GTAACCAAGACCTAGAACTAGCTCTGTACTACGGAGCCACTATTA | |
| | | AATTTTACAGAAGCCCAGACACAGACTTTATAGTAACATACCAGA | |
| | | GAAAATCCCCCCTTGGAGGCAACATACTAACAGCTCCTTCACTA | |
| | | CACCCAGCAGAGGCCATGCTAAGCAAAAACAAAATACTAATACC | |
| | | GAGCTTACAAACAAAACCCAAAGGAAAAAAGACTGTAAAAGTTAA | |
| | | CATACCACCCCCCACCCTTTTTGTACATAAGTGGTACTTTCAGAA | |
| | | GGACATATGTGACCTAACACTGTTTAACTTGAACGTTGTTGCGGC | |
| | | TGACTTGCGGTTTCCGTTCTGCTCACCACAAACTGACAACGTTTG | |
| | | CATCACCTTCCAGGTACTAGCCGCAGAGTACAACAACTTCCTCTC | |
| | | TACAACTTTAGGCACTACAAATGAATCCACTTTTATAGAAAACTTT | |
| | | TTAAAAGTTGCATTTCCAGATGACAAACCTAGGCATTCAAACATT | |
| | | TTAAACACATTTAGAACAGAAGGATGCATGTCTCACCCCCAACTA | |
| | | CAAAAATTTAAACCACCAAACACAGGACCAGGCGAAAACAAATAC | |
| | | TTTTTTACACCAGACGGACTATGGGGAGACCCCATATACATATAC | |
| | | AATAACGGAGTACAACAACAAACTGCACAACAAATTAGAGAAAAA | |
| | | ATTAAAAAAAACATGGAAAATTACTATGCCAAAATAGTAGAAGAA | |
| | | AACACAATAATAACAAAAGGATCAAAAGCACACTGCCATCTAACA | |
| | | GGCATATTTTCACCACCATTCTTAAACATAGGTAGAGTAGCCAGA | |
| | | GAATTTCCAGGACTATACACAGACGTTGTCTATAATCCATGGACA | |
| | | GATAAAGGCAAAGGAAACAAAATATGGTTAGACAGCCTAACAAAA | |
| | | AGCGACAATATATATGACCCAAGACAAAGCATTCTACTAATGGCA | |
| | | GACATGCCACTATACATAATGTTAAATGGATATATAGACTGGGCA | |
| | | AAAAAAGAAAGAAACAACTGGGGCTTAGCTACACAATACAGACTA | |
| | | CTACTAACATGTCCCTACACATTCCCAAGACTATACGTAGAAACA | |
| | | AACCCAAACTATGGATATGTACCATATTCAGAATCATTTGGAGCA | |
| | | GGCCAAATGCCAGACAAAAACCCCTACGTACCAATTACATGGAG | |
| | | AGGCAAATGGTACCCTCACATACTTCATCAAGAGGCAGTTATAAA | |
| | | TGACATAGTAATATCAGGCCCATTCACACCAAAAGACACAAAACC | |
| | | AGTAATGCAATTAAACATGAAATACTCGTTTAGATTCACATGGGG | |
| | | CGGCAATCCTATTTCCACACAGATTGTTAAAGACCCCTGCACCCA | |
| | | GCCCACCTTTGAAATACCCGGTGGCGGTAACATCCCTCGCAGAA | |
| | | TACAAGTCATCAATCCGAAAGTCCTCGGACCCAGCTACAGTTTCA | |
| | | GATCCTTTGACCTCAGACGTGACATGTTTAGCGGCTCGAGTCTTA | |
| | | AAAGAGTCTCAGAACAACAAGAGACTTCTGAGTTTTTATTCTCCG | |
| | | GCGGCAAACGCCCCAGGATCGACCTTCCCAAGTACGTCCCGCC | |
| | | AGAAGAAGACTTCAATATCCAAGAGAGACAACAAAGAGAACAGA | |
| | | GACCGTGGACGAGCGAAAGCGAGAGCGAAGCAGAAGCCCAAGA | |
| | | AGAGACGCAGGCGGGCTCGGTCCGAGAGCAGCTCCAGCAGCA | |
| | | GCTCCAAGAGCAGTTTCAACTCCGAAGAGGGCTCAAGTGCCTCT | |
| | | TCGAGCAGTTAGTCAGAACCCAACAGGGAGTCCACGTAGATCCC | |
| | | TGCCTCGTGTAG | |
| BAB79354.1 | AB064606.1 | ATGGCATGGGGATGGTGGAAGCGACGGCGGCGCTGGTGGTTCC | 196 |
| | | GGAAGCGGTGGACCCGTGGCAGACTTCGCAGACGATGGCCTCG | |
| | | ATCAGCTCGTCGCCGCCCTAGACGACGAAGAGTAAGGAGACGC | |
| | | AGACGATGGAGGAGGGGGCGACCTAGACGCAGACTGTACCGAC | |
| | | GCTACAGACGCAAAAAACGTAGGAGACGAAAGCCCAAAACAGTT | |
| | | TTAAAACAATGGCAGCCAGACATTACAAAGAGGTGCTACATAATA | |
| | | GGCTACATTCCTGCCATAATATGCGGGGCGGGCACCTGGTCTCA | |
| | | CAACTACACCAGCCACCTGCTAGATATTATCCCCAAGGGACCGT | |
| | | TTGGAGGGGGACACAGCACCATGAGATTCTCCCTAAAAGTGCTC | |
| | | TTCGAAGAGCACCTGAGACACCTAAACTTTTGGACACGTAGTAA | |
| | | CCAGGATTTAGAACTTGTAAGATACTTTAGATGCTCCTTTAGGTT | |
| | | CTACAGAGACCAACACACAGACTATCTTGTACACTACAGCAGAAA | |
| | | AACACCCCTGGGAGGCAACAGACTGACAGCACCTAGCCTTCACC | |
| | | CAGGGGTACAGATGCTAAGCAAAAACAAAATAATAGTACCCAGC | |
| | | TATGATACTAAACCTAAGGGCAAAAGCTATGTAAAAGTAACTATA | |
| | | GCACCCCCCACTCTACTAACTGACAAGTGGTACTTTAGCAAAGA | |
| | | CATTTGTGACACAACCTTGGTTAACTTAGACGTTGTACTCTGCAA | |
| | | CTTGCGGTTTCCGTTCTGCTCACCACAAACTGACAACCCTTGCAT | |
| | | CACGTTTTCCGTTCTTCACTCCATCTACAACGACTTCCTCTCTATA | |
| | | GTAGATACTGGAAACTATAAAACACAATTTGTGTCAAACTTATCTA | |
| | | CAAAAGTAGGTACTGACTGGGGAAAAAGACTAAACACATTTAGAA | |
| | | CAGAAGGCTGCTACTCTCACCCTAAATTACCCAAAAAGGCAGTA | |
| | | ACACCTGGAAATGACAAAACATACTTTACTGTACCCGATGGCTTA | |
| | | TGGGGAGACGCTGTATTTAATGCAGAGGCAAGCAATATAATTACT | |
| | | AAAAACATGGAGTCATACAGCGAGTCTGCAAAAGCCAGAGGAGT | |
| | | GCAAGGAGACCCTGCATTTTGCCACCTTACAGGCATATACTCAC | |
| | | CTCCCTGGCTAACACCAGGTAGAATATCCCCGGAGACTCCAGGA | |
| | | CTTTACACAGACGTGACTTACAACCCATACGCAGACAAAGGAGT | |
| | | GGGTAACAGAATATGGGTTGACTACTGCAGTAAAAAAGGCAATA | |
| | | AATATGACAATACAAGTAAATGCCTTTTAGAAGACATGCCACTAT | |
| | | GGATGGTCACCTTTGGCTATGTAGACTGGGTAAAAAAAGAAACT | |
| | | GGCAACTGGGGTATTCCACTGTGGGCCAGAGTACTGATAAGATG | |
| | | CCCTTACACAGTACCAAAACTTTACAATGAAGCAGACCCAAACTA | |
| | | CGGATGGGTCCCTTACTCCTACTACTTTGGAGAAGGAAAAATGC | |
| | | CAAACGGAGACCTGTACGTACCCTTTAAAATTAGAATGAAGTGGT | |
| | | ACCCGTCCATGTGGAACCAAGAACCAGTACTAAATGACTTAGCA | |
| | | AAGAGCGGACCGTTTGCATACAAAGACACAAAAACCAGTGTGAC | |
| | | TGTGACTGCTAAATACAAATTTACATTTAACTTCGGGGGCAACCC | |
| | | CGTACCCTCACAGATTGTACAAGATCCCTGCACACAGTCCACCT | |
| | | ATGACATCCCCGGCACCGGTAACTTGCCTCGCAGAATACAAGTC | |
| | | ATTGACCCGAAAGTCCTCGGTCCCCACTACTCATTCCACCGCTG | |
| | | GGACTTCAGGCGTGGCCTCTTTGGCCAACAAGCTATTAAGAGAG | |
| | | TGTCAGAACAACCAACAACTTCTGAGTTTTTATTCTCAGGTCCAA | |
| | | AGAGACCCAGAATCGATCAAGGGCCTTACATCCCGCCAGAAAAA | |
| | | GGCTCAGATTCACTCCAAAGAGAATCGAGACCGTGGAGCAACTC | |
| | | GGAGACCGAGGCAGAGACAGAAGCCCCCTCGGAAGAAGAGCC | |
| | | GGAGAACCAAGAAGAACAAGTACTCCAGTTGCAGCTCCGACAGC | |
| | | AGCTCCGAGAACAGCGAAAACTCAGACAGGGAATCCAGTGCCTC | |
| | | TTCGAGCAACTGATAACAACCCAACAGGGGGTTCACAAAAACCC | |
| | | ATTGCTAGAGTAG | |
| ABD34286.1 | DQ186994.1 | ATGGCGTGGTCGTGGTGGTGGAGGCGACGGAAACGCTGGTGGC | 197 |
| | | CGCGCAGAAGGAGGCGATGGAGGAGATTTCGCACCCGAAGAGC | |
| | | TAGACGAGCTGTTCCGCGCCGTCGCCGCCGACGAAGAGTAAGG | |
| | | AGGCGCCGGTGGGGGAGGCGAAGACGTAGGAGACGGGTTTTTT | |
| | | ATAAGAGACGCAGACGAAAGACTGGCAGACTGTACAGAAAGCCC | |
| | | AAAAAGAAACTAGTACTGACTCAGTGGCACCCCACTACCGTCCG | |
| | | CAACTGCTCCATCCGAGGCCTTGTGCCTCTAGTACTCTGCGGAC | |
| | | ACACTCAGGGCGGCAGAAACTTTGCTCTCAGGAGCGATGACTAC | |
| | | CCCAAGCAGGGGTCTCCTTACGGAGGCAGTTTTAGCACTACAAC | |
| | | CTGGAACTTGAGGGTCCTTTTTGACGAACACCAAAAACACCACA | |
| | | ACACGTGGAGCTACCCCAATAACCAGCTAGACCTGGGCAGATAC | |
| | | AAGGGCTGCACCTTCTACTTTTACAGAGACAAAAAGACAGACTAC | |
| | | ATAGTAAAGTTTCAGAGGAGGGGACCCTTTAAAATAAACAAGTAC | |
| | | AGCAGTCCCATGGCCCATCCGGGCATGATGATGCTAGATAAGAT | |
| | | GAAAATCCTGGTGCCCAGCTTTGATACCAGGCCCGGGGGTCGC | |
| | | AGAAGAGTAAAAGTAACTATCCGCCCCCCCACTCTGTTAGAGGA | |
| | | CAAGTGGTACACCCAGCAAGACCTGGCGCCCGTTAATCTTGTGT | |
| | | CACTTGTGGTTTCTGCGGCTAGCTTCATACATCCGTTTAGCCAAC | |
| | | CACAAACGAACAACATTTGCACAACCTTCCAGGTGTTGAAAGACA | |
| | | TGTACTATGACTGCATAGGAATTAATTCCACTTTAACAACCAAGT | |
| | | ATGAAAACTTATTTAATAAACTATATTCCAAATGCTGCTACTTTGA | |
| | | AACCTTTCAAACAATAGCCCAGCTAAATCCTGGCTTTAAAGCTGC | |
| | | TAAAAAGACTACTAATGGTTCTGGTTCTACAGCTGCAACACTAGG | |
| | | AGACGCAGTAACTGAACTTAAAAACCCAAATGGTACTTTTTACAC | |
| | | AGGCAACAATAGCACCTTTGGCTGCTGCACATATAAACCCACTAA | |
| | | AGAAATAGGTAGTAATGCCAATAAGTGGTTCTGGCATCAGTTAAC | |
| | | AGCCACAGATTCAGACACACTAGGCCAATACGGCCGTGCCTCCA | |
| | | TTAAGTATATGGAGTACCACACAGGCATTTACAGCTCAATTTTTCT | |
| | | TAGCCCACTAAGAAGCAATCTAGAATTCCCTACAGCATACCAAGA | |
| | | TGTAACATATAATCCACTAACTGACAGAGGTATAGGTAACAGAAT | |
| | | CTGGTACCAGTACAGTACCAAAGAAAACACTACATTTAATGAAAC | |
| | | ACAGTGCAAATGTGTACTATCAGACTTGCCACTGTGGAGCATGTT | |
| | | TTATGGCTATGTAGATTTTATAGAGTCAGAACTAGGCATCTCAGC | |
| | | AGAGATACACAACTTTGGCATAGTATGTGTCCAGTGCCCCTACA | |
| | | CGTTTCCCCCAATGTTTGACAAATCCAAACCAGATAAAGGCTACG | |
| | | TGTTCTATGACACCCTTTTTGGCAACGGAAAGATGCCAGACGGG | |
| | | AGCGGACACGTACCCACCTACTGGCAGCAGAGGTGGTGGCCCA | |
| | | GATTCAGCTTCCAGAGACAAGTGATGCACGACATTATCCTCACC | |
| | | GGGCCCTTCAGCTACAAAGATGACTCTGTAATGACTGGCATAAC | |
| | | CGCAGGCTACAAGTTTAAATTCTCATGGGGCGGTGATATGGTCT | |
| | | CCGAACAGGTCATTAAAAACCCAGAGAGAGGGGACGGACGAGA | |
| | | CTCCACCTATCCCGATAGACAGCGCCGCGACTTACAAGTTGTTG | |
| | | ACCCACGCTCCATGGGCCCCCAATGGGTATTCCACACCTTTGAC | |
| | | TACAGACGGGGGCTTTTTGGAAAGGACGCTATTAAGCGAGTGTC | |
| | | AGAAAAACCGACAGATCCTGACTACTTTACAACACCTTACAAAAA | |
| | | ACCAAGATTTTTCCCTCCAACAGCAGGAGAAGAAAAACTGCAAG | |
| | | AAGAAGACTCCGCTTTACAGGAGAAAAGAAGCCCGCTCTCGTCA | |
| | | GAAGAGGGGCAGACGAGGGCGCAAGTCCTCCAGCAGCAGGTC | |
| | | CTCCAGTCGGAGCTCCAGCAGCAGCAGGAGCTCGGGGAGCAGC | |
| | | TCAGATTCCTCCTCAGGGAAATGTTCAAAACCCAAGCGGGCATA | |
| | | CACATGAACCCCCGCGCATTTCAGGAGCTGTAA | |
| ABD34288.1 | DQ186995.1 | ATGGCGTGGTCGTGGTGGTGGAGGCGACGGAAACGCTGGTGGC | 198 |
| | | CGCGCAGAAGGAGGCGATGGAGGAGATTTCGCACCCGAAGAGC | |
| | | TAGACGAGCTGTTCCGCGCCGTCGCCGCCGACGAAGAGTAAGG | |
| | | AGGCGCCGGTGGGGGAGGCGAAGACGTAGGAGACGGGTTTTTT | |
| | | ATAAGAGACGCAGACGAAAGACTGGCAGACTGTACAGAAAGCCC | |
| | | AAAAAGAAACTAGTACTGACTCAGTGGCACCCCACTACCGTCCG | |
| | | CAACTGCTCCATCCGAGGCCTTGTGCCTCTAGTACTCTGCGGAC | |
| | | ACACTCAGGGCGGCAGAAACTTTGCTCTCAGGAGCGATGACTAC | |
| | | CCCAAGCAGGGGTCTCCTTACGGAGGCAGTTTTAGCACTACAAC | |
| | | CTGGAACTTGAGGGTCCTTTTTGACGAACACCAAAAACACCACA | |
| | | ACACGTGGAGCTACCCCAATAACCAGCTAGACCTGGGCAGATAC | |
| | | AAGGGCTGCACCTTCTACTTTTACAGAGACAAAAAGACAGACTAC | |
| | | ATAGTAAAGTTTCAGAGGAGGGGACCCTTTAAAATAAACAAGTAC | |
| | | AGCAGTCCCATGGCCCATCCGGGCATGATGATGCTAGATAAGAT | |
| | | GAAAATCCTGGTGCCCAGCTTTGATACCAGGCCCGGGGGTCGC | |
| | | AGAAGAGTAAAAGTAACTATCCGCCCCCCCACTCTGTTAGAGGA | |
| | | CAAGTGGTACACCCAGCAAGACCTGGCGCCCGTTAATCTTGTGT | |
| | | CACTTGTGGTTTCTGCGGCTAGCTTCATACATCCGTTTAGCCAAC | |
| | | CACAAACGAACAACATTTGCACAACCTTCCAGGTGTTGAAAGACA | |
| | | TGTACTATGACTGCATAGGAATTAATTCCACTTTAACAACCAAGT | |
| | | ATGAAAACTTATTTAATAAACTATATTCCAAATGCTGCTACTTTGA | |
| | | AACCTTTCAAACAATAGCCCAGCTAAATCCTGGCTTTAAAGCTGC | |
| | | TAAAAAGACTACTAATGGTTCTGGTTCTACAGCTGCAACACTAGG | |
| | | AGACGCAGTAACTGAACTTAAAAACCCAAATGGTACTTTTTACAC | |
| | | AGGCAACAATAGCACCTTTGGCTGCTGCACATATAAACCCACTAA | |
| | | AGAAATAGGTAGTAATGCCAATAAGTGGTTCTGGCATCAGTTAAC | |
| | | AGCCACAGATTCAGACACACTAGGCCAATACGGCCGTGCCTCCA | |
| | | TTAAGTATATGGAGTACCACACAGGCATTTACAGCTCAATTTTTCT | |
| | | TAGCCCACTAAGAAGCAATCTAGAATTCCCTACAGCATACCAAGA | |
| | | TGTAACATATAATCCACTAACTGACAGAGGTATAGGTAACAGAAT | |
| | | CTGGTACCAGTACAGTACCAAAGAAAACACTACATTTAATGAAAC | |
| | | ACAGTGCAAATGTGTACTATCAGACTTGCCACTGTGGAGCATGTT | |
| | | TTATGGCTATGTAGATTTTATAGAGTCAGAACTAGGCATCTCAGC | |
| | | AGAGATACACAACTTTGGCATAGTATGTGTCCAGTGCCCCTACA | |
| | | CGTTTCCCCCAATGTTTGACAAATCCAAACCAGATAAAGGCTACG | |
| | | TGTTCTATGACACCCTTTTTGGCAACGGAAAGATGCCAGACGGG | |
| | | AGCGGACACGTACCCACCTACTGGCAGCAGAGGTGGTGGCCCA | |
| | | GATTCAGCTTCCAGAGACAAGTGATGCACGACATTATCCTCACC | |
| | | GGGCCCTTCAGCTACAAAGATGACTCTGTAATGACTGGCATAAC | |
| | | CGCAGGCTACAAGTTTAAATTCTCATGGGGCGGTGATATGGTCT | |
| | | CCGAACAGGTCATTAAAAACCCAGAGAGAGGGGACGGACGAGA | |
| | | CTCCACCTATCCCGATAGACAGCGCCGCGACTTACAAGTTGTTG | |
| | | ACCCACGCTCCATGGGCCCCCAATGGGTATTCCACACCTTTGAC | |
| | | TACAGACGGGGGCTTTTTGGAAAGGACGCTATTAAGCGAGTGTC | |
| | | AGAAAAACCGACAGATCCTGACTACTTTACAACACCTTACAAAAA | |
| | | ACCAAGATTTTTCCCTCCAACAGCAGGAGAAGAAAAACTGCAAG | |
| | | AAGAAGACTCCGCTTTACAGGAGAAAAGAAGCCCGCTCTCGTCA | |
| | | GAAGAGGGGCAGACGAGGGCGCAAGTCCTCCAGCAGCAGGTC | |
| | | CTCCAGTCGGAGCTCCAGCAGCAGCAGGAGCTCGGGGAGCAGC | |
| | | TCAGATTCCTCCTCAGGGAAATGTTCAAAACCCAAGCGGGCATA | |
| | | CACATGAACCCCCGCGCATTTCAGGAGCTGTAA | |
| ABD34290.1 | DQ186996.1 | ATGGCATGGGGATGGTGGAGATGGCGGCGCCGCTGGCCCGCC | 199 |
| | | AGACGCTGGAGGAGACGCCGTCGCCGGCGCCCCGTACGGAGA | |
| | | ACAAGAGCTCGCCGACCTGCTCGACGCTATAGAAGACGACGAA | |
| | | CAGTAAGAACCAGGCGGAGGCGGTGGGGGCGCAGACGGTACA | |
| | | GACGGGGCTGGAGACGCAGGACTTATGTGAGGAAGGGGCGACA | |
| | | CAGAAAAAAGAAAAAGAGACTCATACTGAGACAGTGGCAGCCCG | |
| | | CCACCAGACGCAGATGCACCATAACAGGGTACCTGCCCATAGTG | |
| | | TTCTGCGGCCACACTAAGGGCAATAAAAACTACGCCCTACACTC | |
| | | TGACGACTACACCCCCCAAGGACAGCCATTTGGAGGGGCTCTAA | |
| | | GCACTACCTCATTCTCTTTAAAAGTACTGTTTGACCAGCATCAGA | |
| | | GAGGACTGAATAAGTGGTCGTTCCCCAACGACCAACTAGACCTG | |
| | | GCCAGATACAGGGGCTGCAAATTCTACTTTTACAGGACAAAACA | |
| | | GACTGACTGGATAGGCCAGTATGATATATCAGAGCCCTACAAGC | |
| | | TAGACAAGTACAGCTGCCCCAACTACCACCCGGGAAACATGATT | |
| | | AAAGCAAAGCACAAATTTTTAATTCCCAGCTATGACACTAATCCC | |
| | | AGGGGCAGACAAAAAATTATAGTTAAAATTCCCCCCCCAGACCT | |
| | | CTTTGTAGACAAGTGGTACACTCAGGAAGACCTGTGTTCCGTTAA | |
| | | TCTTGTGTCACTTGCGGTTTCTGCGGCTTCCTTTCTCCACCCATT | |
| | | CGGCTCACCACAAACTGACAACCCTTGCTACACCTTCCAGGTGT | |
| | | TGAAAGAGTTCTACTACCAGGCAATAGGCTTCTCAGCAACAGAT | |
| | | CAACAAAGAGAAAAAGTTTTTGATATATTATACAAAAACAACTCAT | |
| | | ACTGGGAATCAAACATAACTCCCTTTTATGTAATTAATGTTAAAAA | |
| | | AGGGTCTAACACAACACAGTACATGTCACCTCAAATTTCAGACTC | |
| | | ATCTTTTAGAAAGAAAGTAAATACTAACTACAACTGGTATACCTAC | |
| | | GATGCCAAAACTAATGCATCACAATTAAAGCAACTAAGAAATGCA | |
| | | TACTTTAAACAATTAACCTCTGAAGGCCCACAACACACATACTCT | |
| | | GACAATGGCTACGCCAGTCAGTGGACCACCCCCAGCACAGACG | |
| | | CCTACGAATACCACTTAGGCATGTTTAGTACTATATTTTTAGCCC | |
| | | CAGACAGACCAGTACCTCGCTTTCCCTGCGCTTACCAAGATGTT | |
| | | ACTTACAACCCACTAATGGACAAAGGAGTGGGCAACCATGTATG | |
| | | GTTTCAATACAACACAAAGGCAGACACACAGCTAATAGTTACAGG | |
| | | AGGGTCCTGCAAAGCACACATACAAGACATACCCCTATGGGCAG | |
| | | CCTTCTATGGATACAGTGACTTTATAGAGTCAGAGCTAGGCCCCT | |
| | | TTGTAGACGCAGACACAGTAGGCCTTATCTGTGTAATATGCCCTT | |
| | | ACACTAAACCTCCCATGTACAACAAGACAAATCCCATGATGGGG | |
| | | TACGTGTTTTATGACAGAAACTTTGGTGACGGCAAATGGACTGAC | |
| | | GGACGGGGCAAAATAGAGCCCTACTGGCAAGTTAGGTGGAGGC | |
| | | CCGAAATGCTTTTCCAAGAAACTGTAATGGCAGACATAGTACAGA | |
| | | CAGGGCCCTTTAGCTACAAAGATGAACTTAAAAACAGCACACTA | |
| | | GTATGCAAGTACAAATTCTATTTTACCTGGGGAGGTAACATGATG | |
| | | TTCCAACAGACGATCAAAAACCCGTGCAAGACGGACGGACAACC | |
| | | CACCGACTCCAGTAGACACCCTAGAGGAATACAAGTGGCGGAC | |
| | | CCGGAACAAATGGGACCCCGCTGGGTGTTCCACTCCTTTGACTG | |
| | | GCGAAGGGGCTATCTTAGCGAGAAAGCTCTCAAACGCCTGCAAG | |
| | | AAAAACCTCTTGACTATGACGAATATTTTACACAACCAAAAAGAC | |
| | | CTAGAATCTTTCCTCCAACAGAATCAGCAGAGGGAGAGTTCCGA | |
| | | GAGCCCGAAAAAGGCTCGTATTCAGAGGAAGAAAGGTCGCAAG | |
| | | CCTCTGCCGAAGAGCAGACGGAGGAGGCGACAGTACTCCTCCT | |
| | | CAAGCGACGACTCAGAGAGCAACAGCAGCTCCAGCAGCAGCTC | |
| | | CAATTCCTCACCCGAGAAATGTTCAAAACGCAAGCGGGTCTCCA | |
| | | CATAAACCCTATGTTATTAAACCAGCGATAA | |
| ABD34292.1 | DQ186997.1 | ATGGCATGGGGATGGTGGAGATGGCGGCGCCGCTGGCCCGCC | 200 |
| | | AGACGCTGGAGGAGACGCCGTCGCCGGCGCCCCGTACGGAGA | |
| | | ACAAGAGCTCGCCGACCTGCTCGACGCTATAGAAGACGACGAA | |
| | | CAGTAAGAACCAGGCGGAGGCGGTGGGGGCGCAGACGGTACA | |
| | | GACGGGGCTGGAGACGCAGGACTTATGTAAGGAAGGGGCGACA | |
| | | CAGAAAAAAGAAAAAGAGACTGATACTGAGACAGTGGCAGCCCG | |
| | | CCACCAGACGCAGATGCACCATAACAGGGTACCTGCCCATAGTG | |
| | | TTCTGCGGCCACACTAAGGGCAATAAAAACTACGCCCTACACTC | |
| | | TGACGACTACACCCCCCAAGGACAGCCATTTGGAGGGGCTCTAA | |
| | | GCACTACCTCATTCTCTTTAAAAGTACTGTTTGACCAGCATCAGA | |
| | | GAGGACTGAATAAGTGGTCGTTCCCCAACGACCAACTAGACCTG | |
| | | GCCAGATACAGGGGCTGCAAATTCTACTTTTACAGGACAAAACA | |
| | | GACTGACTGGATAGGCCAGTATGATATATCAGAGCCCTACAAGC | |
| | | TAGACAAGTACAGCTGCCCCAACTACCACCCGGGAAACATGATT | |
| | | AAAGCAAAGCACAAATTTTTAATTCCCAGCTATGACACTAATCCC | |
| | | AGGGGCAGACAAAAAATTATAGTTAAAATTCCCCCCCCAGACCT | |
| | | CTTTGTAGACAAGTGGTACACTCAGGAAGACCTCTGTTCCGTTAA | |
| | | TCTTGTGTCACTTGCGGTTTCTGCGGCTTCCTTTCTCCACCCATT | |
| | | CGGCTCACCACAAACTGACAACCCTTGCTACACCTTCCAGGTGT | |
| | | TGAAAGAGTTCTACTACCAGGCAATAGGCTTCTCAGCAACAGAT | |
| | | GAACAAAGAGAAAAAGTTTTTGATATATTATACAAAAACAACTCAT | |
| | | ACTGGGAATCAAACATAACTCCCTTTTATGTAATTAATGTTAAAAA | |
| | | AGGGTGTAACACAACACAGTACATGTCACCTCAAATTTCAGACTC | |
| | | ATCTTTTAGAAAGAAAGTAAATACTAACTACAACTGGTATACCTAC | |
| | | GATGCCAAAACTAATGCATCACAATTAAAGCAACTAAGAAATGCA | |
| | | TACTTTAAACAATTAACCTCTGAAGGCCCACAACACACATACTCT | |
| | | GACAATGGCTACGCCAGTCAGTGGACCACCCCCAGCACAGACG | |
| | | CCTACGAATACCACTTAGGCATGTTTAGTACTATATTTTTAGCCC | |
| | | CAGACAGACCAGTACCTCGCTTTCCCTGCGCTTACCAAGATGTT | |
| | | ACTTACAACCCACTAATGGACAAAGGAGTGGGCAACCATGTATG | |
| | | GTTTCAGTACAACACAAAGGCAGACACACAGCTAATAGTTACAG | |
| | | GAGGGTCCTGCAAAGCACACATACAAGACATACCCCTATGGGCA | |
| | | GCCTTCTATGGATACAGTGACTTTATAGAGTCAGAGCTAGGCCC | |
| | | CTTTGTAGACGCAGACACAGTAGGCCTTATCTGTGTAATATGCCC | |
| | | TTACACTAAACCCCCCATGTACAACAAGACAAATCCCATGATGGG | |
| | | GTACGTGTTTTATGACAGAAACTTTGGTGACGGCAAATGGACTG | |
| | | ACGGACGGGGCAAAATAGAGCCCTACTGGCAAGTTAGGTGGAG | |
| | | GCCCGAAATGCTTTTCCAAGAAACTGTAATGGCAGACATAGTACA | |
| | | GACAGGGCCCTTTAGCTACAAAGATGAACTTAAAAACAGCACAC | |
| | | TAGTATGCAAGTACAAATTCTATTTTACCTGGGGAGGTAACATGA | |
| | | TGTTCCAACAGACGATCAAAAACCCGTGCAAGACGGACGGACAA | |
| | | CCCACCGACTCCAGTAGACACCCTAGAGGAATACAAGTGGCGG | |
| | | ACCCGGAACAAATGGGACCCCGCTGGGTGTTCCACTCCTTTGAC | |
| | | TGGCGAAGGGGCTATCTTAGCGAGAAAGCTCTCAAACGCCTGCA | |
| | | AGAAAAACCTCTTGACTATGACCAATATTTTACACAACCAAAAAG | |
| | | ACCTAGAATCTTTCCTCCAACAGAATCAGCAGAGGGAGAGTTCC | |
| | | GAGAGCCCGAAAAAGGCTCGTATTCAGAGGAAGAAAGGTTGCAA | |
| | | GCCTCTGCCGAAGAGCAGACGGAGGAGGCGACAGTACTCCTCC | |
| | | TCAAGCGACGACTCAGAGAGCAACAGCAGCTCCAGCAGCAGCT | |
| | | CCAATTCCTCACCCGAGAAATGTTCAAAACGCAAGCGGGTCTCC | |
| | | ACATAAACCCTATGTTATTAAACCAGCGATAA | |
| ABD34294.1 | DQ186998.1 | ATGGCATGGGGATGGTGGAGATGGCGGCGCCGCTGGCCCGCC | 201 |
| | | AGACGCTGGAGGAGACGCCGTCGCCGGCGCCCCGTACGGAGA | |
| | | ACAAGAGCTCGCCGACCTGCTCGACGCTATAGAAGACGACGAA | |
| | | CAGTAAGAACCAGGCGGAGGCGGTGGGGGCGCAGACGGTACA | |
| | | GACGGGGCTGGAGACGCAGGACTTATGTAAGGAAGGGGCGACA | |
| | | CAGAAAAAAGAAAAAGAGACTGATACTGAGACAGTGGCAGCCCG | |
| | | CCACCAGACGCAGATGCACCATAACAGGGTACCTGCCCATAGTG | |
| | | TTCTGCGGCCACACTAAGGGCAATAAAAACTACGCCCTACACTC | |
| | | TGACGACTACACCCCCCAAGGACAGCCATTTGGAGGGGCTCTAA | |
| | | GCACTACCTCATTCTCTTTAAAAGTACTGTTTGACCAGCATCAGA | |
| | | GAGGACTGAATAAGTGGTCGTTCCCCAACGACCAACTAGACCTG | |
| | | GCCAGATACAGGGGCTGCAAATTCTACTTTTACAGGACAAAACA | |
| | | GACTGACTGGATAGGCCAGTATGATATATCAGAGCCCTACAAGC | |
| | | TAGACAAGTACAGCTGCCCCAACTACCACCCGGGAAACATGATT | |
| | | AAAGCAAAGCACAAATTTTTAATTCCCAGCTATGACACTAATCCC | |
| | | AGGGGCAGACAAAAAATTATAGTTAAAATTCCCCCCCCAGACCT | |
| | | CTTTGTAGACAAGTGGTACACTCAGGAAGACCTGTGTTCCGTTAA | |
| | | TCTTGTGTCACTTGCGGTTTCTGCGGCTTCCTTTCTCCACCCATT | |
| | | CGGCTCACCACAAACTGACAACCCTTGCTACACCTTCCAGGTGT | |
| | | TGAAAGAGTTCTACTACCAGGCAATAGGCTTCTCAGCAACAGAT | |
| | | GAACAAAGAGAAAAAGTTTTTGATATATTATACAAAAACAACTCAT | |
| | | ACTGGGAATCAAACATAACTCCCTTTTATGTAATTAATGTTAAAAA | |
| | | AGGGTGTAACACAACACAGTGCATGTCACCTCAAATTTCAGACTC | |
| | | ATCTTTTAGAAAGAAAGTAAATACTAACTACAACTGGTATACCTAC | |
| | | GATGCCAAAACTAATGCATCACAATTAAAGCAACTAAGAAATGCA | |
| | | TACTTTAAACAATTAACCTCTGAAGGCCCACAACACACATACTCT | |
| | | GACAATGGCTACGCCAGTCAGTGGACCACCCCCAGCACAGACG | |
| | | CCTACGAATACCACTTAGGCATGTTTAGTACTATATTTTTAGCCC | |
| | | CAGACAGACCAGTACCTCGCTTTCCCTGCGCGTACCAAGATGTT | |
| | | ACTTACAACCCACTAATGGACAAAGGAGTGGGCAACCATGTATG | |
| | | GTTTCAGTACAACACAAAGGCAGACACACAGCTAATAGTTACAG | |
| | | GAGGGTCCTGCAAAGCACACATACAAGACATACCCCTATGGGCA | |
| | | GCCTTCTATGGATACAGTGACTTTATAGAGTCAGAGCTAGGCCC | |
| | | CTTTGTAGACGCAGACACAGTAGGCCTTATCTGTGTAATATGCCC | |
| | | TTACACTAAACCCCCCATGTACAACAAGACAAATCCCATGATGGG | |
| | | GTACGTGTTTTATGACAGAAACTTTGGTGACGGCAAATGGACTG | |
| | | ACGGACGGGGCAAAATAGAGCCCTACTGGCAAGTTAGGTGGAG | |
| | | GCCCGAAATGCTTTTCCAAGAAACTGTAATGGCAGACATAGTACA | |
| | | GACAGGGCCCTTTAGCTACAAAGATGAACTTAAAAACAGCACAC | |
| | | TAGTATGCAAGTACAAATTCTATTTTACCTGGGGAGGTAACATGA | |
| | | TGTTCCAACAGACGATCAAAAACCCGTGCAAGACGGACGGACAA | |
| | | CCCACCGACTCCAGTAGACACCCTAGAGGAATACAAGTGGCGG | |
| | | ACCCGGAGCAAATGGGACCCCGCTGGGTGTTCCACTCCTTTGAC | |
| | | TGGCGAAGGGGCTATCTTAGCGAGAAAGCTCTCAAACGCCTGCA | |
| | | AGAAAAACCTCTTGACTATGACCAATATTTTACACAACCAAAAAG | |
| | | ACCTAGAATCTTTCCTCCAACAGAATCAGCAGAGGGAGAGTTCC | |
| | | GAGAGCCCGAAAAAGGCTCGTATTCAGAGGAAGAAAGGTCGCA | |
| | | AGCCTCTGCCGAAGAGCGGACGGAGGAGGCGACAGTACTCCTC | |
| | | CTCAAGCGACGACTCAGAGAGCAACAGCAGCTCCAGCAGCAGC | |
| | | TCCAATTCCTCACCCGAGAAATGTTCAAAACGCAAGCGGGTCTC | |
| | | CACATAAACCCTATGTTATTAAACCAGCGATAA | |
| ABD34296.1 | DQ186999.1 | ATGGCATGGAGATGGTGGAAGCGACGGAGGCGCTGGTGGTTCC | 202 |
| | | GCAAGCGGTGGACCCGTGGCAGACTTCGCAGACGATGGCCTCG | |
| | | ACCAGCTCGTCGCCGACCTAGACGACGAAGAGTAAGGAGACGC | |
| | | AGACGTTGGAGGAGGGGGCGACCCAGACGTAGACTGTACCGAC | |
| | | GCTACAGACGCAAAAAACGTAGGAGACGAAAGCCCAAAATAATC | |
| | | TTAAAACAATGGCAGCCAGACATTGTAAAGAGGTGCTACATAGT | |
| | | GGGCTACATTCCTGCCATAATATGTGGGGCGGGCACCTGGTCTC | |
| | | ACAACTACACCAGCCACCTTCTAGACATTATCCCCAAGGGACCC | |
| | | TTTGGAGGAGGGCACAGCACTATGAGGTTCTCCCTAAAAGTACT | |
| | | CTCTGAAGAACACCTCAGACACTTAAACTTTTGGACAAAGAGTAA | |
| | | CCAGGACCTAGAACTGATAAGATACTTTAGATGCTCCTTTAAATT | |
| | | TTATAGAGACCAAGACACAGACTACATAGTACACTACAGCAGAAA | |
| | | AACTCCCCTGGGAGGCAACAGACTGACAGCACCTAACCTGCACC | |
| | | CAGGGGTACAAATGCTTAGCAAAAACAAAATAATAGTACCTAGCT | |
| | | ATGCTACAAAACCCAAGGGTCCTAGCTATATAAAAGTAACCATAG | |
| | | CACCCCCCACACTGCTAACTGACAAGTGGTACTTTAGCAAAGAC | |
| | | GTTTGTGACACAACCTTGGTTAACTTAGACGTTGTACTCTGCAAC | |
| | | CTGCGGTTTCCGTTCTGCTCACCACAAACTGACAACCCTTGCATC | |
| | | ACATTCCAAGTTCTGCATTCCATCTACAACGACTTCCTCTCTATA | |
| | | GTAGATACTAACAACTATAAAGAATCTTTTGTTAGTGCATTACCAA | |
| | | CAAAAGTATCTACTGACTGGGGCAAAAGACTAAACACCTTTAGAA | |
| | | CAGAAGGATGCTATTCACACCCCAAATTACATAAAAAAGCTGTAA | |
| | | CAGCTGCTACAGATACAGAATACTTTACAAAGCCAGATGGTCTGT | |
| | | GGGGAGACACTATATTTGATGTAGAAAATGGACAAAAAATTATAA | |
| | | AAAATATGGAGTCATATGCTAAGTCAGCCAAAGAAAGAGGGATC | |
| | | AATGGAGACCCTGCTTTCTGTCACTTAACAGGAATATACTCACCT | |
| | | CCCTGGTTAACACCAGGGAGAATATCTCCAGAAACACCTGGACT | |
| | | TTACACAGACGTGACTTACAACCCTTACGCTGACAAAGGAGTGG | |
| | | GCAACAGAATATGGGTTGACTACTGCAGTAAAAAAGGCAACAAA | |
| | | TATGACAATACAAGTAAATGCCTTTTAGAAGACATGCCACTATGG | |
| | | ATGGTATGCTTTGGCTATGTAGACTGTGTAAAAAAAGAAACCGGC | |
| | | AACTGGGGCATTCCACTATGGGCTAGAGTACTTATAAGAAGCCC | |
| | | ATATACTGTTCCCAAACTATATAATGAAGCAGACCCAAACTATGG | |
| | | ATGGGTACCTATTTTTTACTATTTTGGAGAAGGCAAAATGCCAAA | |
| | | CGGAGACATGTACATACCATTTAAAATAAGAATGAAATGGTACCC | |
| | | TTCAATGTGGAACCAAGAGCCAGTATTAAATGACTTAGCAAAGAG | |
| | | CGGACCGTTTGCATACAAAAACACCAAAACAAGTGTGACTGTGA | |
| | | CTGCCAAATATAAATTCACATTTAACTTCGGTGGCAACCCCGTAC | |
| | | CCTCACAGATTGTACAAGATCCCTGCACACAGCCCACCTACGAC | |
| | | ATCCCCGGCACCGGTAACCTGCCTCGCAGAATACAAGTCATTGA | |
| | | CCCGAAAGTCCTCAGTCCCCACTATTCCTTCCACCGGTGGGACT | |
| | | TCAGACGTGGCCTGTTTGGCTCACAAGCTATTAAGAGAGTGTCA | |
| | | GAACAATCAACAACTTCTGAGTTTTTATTCTCAGGCCCAAAGAAA | |
| | | CCCAGAATCGATCAAGGTCCTTACATCCCGCCAGAAAAAGGCTC | |
| | | AGGTTCACTCCAAAGAGAACCGAGACCGTGGAGCAGCTCGGAG | |
| | | ACCGAGGCAGAGACAGAAGCCCCCTCGGAAGAAGAGCCGGAGA | |
| | | ACCAAGAAGAACAAGTACTCCAGTTGCAGCTCAGACAGCAGCTC | |
| | | CGAGAACAGCGAAAACTCAGACAGGGAATCCAGTGCCTATTCGA | |
| | | GCAACTAATAACAACTCAGCAGGGGGTCCACAAAAACCCATTGT | |
| | | TAGAGTAG | |
| ABD34298.1 | DQ187000.1 | ATGGCATGGAGATGGTGGAAGCGACGGAGGCGCTGGTGGTTCC | 203 |
| | | GCAAGCGGTGGACCCGTGGCAGACTTCGCAGACGATGGCCTCG | |
| | | ACCAGCTCGTCGCCGACCTAGACGACGAAGAGTAAGGAGACGC | |
| | | AGACGTTGGAGGAGGGGGCGACCCAGACGTAGACTGTACCGAC | |
| | | GCTACAGACGCAAAAAACATAGGAGACGAAAGCCCAAAATAATC | |
| | | TTAAAACAATGGCAGCCAGACATTGTAAAGAGGTGCTACATAGT | |
| | | GGGCTACATTCCTGCCATAATATGTGGGGCGGGCACCTGGTCTC | |
| | | ACAACTACACCAGCCACCTTCTAGACATTATCCCCAAGGGACCC | |
| | | TTTGGAGGAGGGCACAGCACTATGAGGTTCTCCCTAAAAGTACT | |
| | | CTTTGAAGAACACCTCAGACACTTAAACTTTTGGACAAAGAGTAA | |
| | | CCAGGACCTAGAACTGATAAGATACTTTAGATGCTCCTTTAAATT | |
| | | TTATAGAGACCAAGACACAGACTACATAGTACACTACAGCAGAAA | |
| | | AACTCCCCTGGGAGGCAACAGACTGACAGCACCTAACCTGCACC | |
| | | CAGGGGTACAAATGCTTAGCAAAAACAAAATAATGGTACCTAGCT | |
| | | ATGCTACAAAACCCAAGGGTCCTAGCTATATAAAAGTAACCATAG | |
| | | CACCCCCCACACTGCTAACTGACAAGTGGTACTTTAGCAAAGAC | |
| | | GTTTGTGACACAACCTTGGTTAACTTAGACGTTGTACTCTGCAAC | |
| | | CTGCGGTTTCCGTTCTGCTCACCACAAACTGACAACCCTTGCATC | |
| | | ACATTCCAAGTTCTGCATTCCATCTACAACGACTTCCTCTCTATA | |
| | | GTAGATACTAACAACTATAAAGAATCTTTTGTTAGTGCATTACCAA | |
| | | CAAAAGTATCTACTGACTGGGGCAAAAGACTAAACACCTTTAGAA | |
| | | CAGAAGGATGCTATTCACACCCCAAATTACATAAAAAAGCTGTAA | |
| | | CAGCTGCTACAGATACAGAATACTTTACAAAGCCAGATGGTCTGT | |
| | | GGGGAGACACTATATTTGATGTAGAAAATGGACAAAAAATTATAA | |
| | | AAAATATGGAGTCATATGCTAAGTCAGCCAAAGAAAGAGGGATC | |
| | | AATGGAGACCCTGCTTTCTGTCACTTAACAGGAATATACTCACCT | |
| | | CCCTGGTTAACACCAGGGAGAATATCTCCAGAAACACCTGGACT | |
| | | TTACACAGACGTGACTTACAACCCTTACGCTGACAAAGGAGTGG | |
| | | GCAACAGAATATGGGTTGACTACTGCAGTAAAAAAGGCAACAAA | |
| | | TATGACAATACAAGTAAATGCCTTTTAGAAGACATGCCACTATGG | |
| | | ATGGTATGCTTTGGCTATGTAGACTGGGTAAAAAAAGAAACCGG | |
| | | CAACTGGGGCATTCCACTATGGGCTAGAGTACTTATAAGAAGCC | |
| | | CATATACTGTTCCCAAACTATATAATGAAGCAGACCCAAACTATG | |
| | | GATGGGTACCTATTTCTTACTATTTTGGAGAAGGCAAAATGCCAA | |
| | | ACGGAGACATGTACATACCATTTAAAATAAGAATGAAGTGGTACC | |
| | | CTTCAATGTGGAACCAAGAGCCAGTATTAAATGACTTAGCAAAGA | |
| | | GCGGACCGTTTGCATACAAAAACACCAAAACAAGTGTGACTGTG | |
| | | ACTGCCAAATATAAATTCACATTTAACTTCGGTGGCAACCCCGTA | |
| | | CCCTCACAGATTGTACAAGATCCCTGCACACAGCCCACCTACGA | |
| | | CATCCCCGGCACCGGTAACCTGCCTCGCAGAATACAAGTCATTG | |
| | | ACCCGAAAGTCCTCGGTCCCCACTATTCCTTCCACCGGTGGGAC | |
| | | TTCAGACGTGGCCTGTTTGGCTCACAAGCTATTAAGAGAGTGTC | |
| | | AGAACAATCAACAACTTCTGAGTTTTTATTCTCAGGCCCAAAGAA | |
| | | ACCCAGAATCGATCAAGGTCCTTACATCCCGCCAGAAAAAGGCT | |
| | | CAGGTTCACTCCAAAGAGAACCGAGACCGTGGAGCAGCTCGGA | |
| | | GACCGAGGCAGAGACAGAAGCCCCCTCGGAAGAAGAGCCGGA | |
| | | GAACCAAGAAGAACAAGTACTCCAGTTGCAGCTCAGACAGCAGC | |
| | | TCCGAGAACAGCGAAAACTCAGACAGGGAATCCAGTGCCTATTC | |
| | | GAGCAACTAATAACAACTCAGCAGGGGGTCCACAAAAACCCATT | |
| | | GTTAGAGTAG | |
| ABD34300.1 | DQ187001.1 | ATGGCACGGAGATGGTGGAAGCGACGGAGGCGCTGGTGGTTCC | 204 |
| | | GCAAGCGGTGGACCCGTGGCAGACTTCGCAGACGATGGCCTCG | |
| | | ACCAGCTCGTCGCCGACCTAAACGACGAAGAGTAAGGAGACGC | |
| | | AGACGTTGGAGGAGGGGGCGACCCAGACGTAGACTGTACCGAC | |
| | | GCTACAGACGCAAAAAACGTAGGAGACGAAAGCCCAAAATAATC | |
| | | TTAAAACAATGGCAGCCAGACATTGTAAAGAGGTGCTACATAGT | |
| | | GGACTACATTCCTGCCATAATATGTGGGGCGGGCACCTGGTCTC | |
| | | GCAACTACACCAGCCACCTTCTAGACATTATCCCCAAGGGACCC | |
| | | TTTGGAGGAGGGCACAGCACTATGAGGTTCTCCCTAAAAGTACT | |
| | | CTTTGAAGAACACCTCAGGCACTTAAACTTTTGGACAAAGAGTAA | |
| | | CCAGGACCTAGAACTGATAAGATACTTTAGATGCTCCTTTAAATT | |
| | | TTATAGAGACCAAGACACAGACCACATAGTACACTACAGCAGAA | |
| | | AAACTCCCCTGGGAGGCAACAGACTGACAGCACCTAACCTGCAC | |
| | | CCAGGGGTACAAATGCTTAGCAAAAACAAAATAATAGTACCTAGC | |
| | | TATGCTACAAAACCCAAGGGTCCTAGCTATATAAAAGTAACCATA | |
| | | GCACCCCCCACACTGCTAACTGACAAGTGGTACTTTAGCAAAGA | |
| | | CGTTTGTGACACAACCTTGGTTAACTTAGACGTTGTACTCTGCAA | |
| | | CCTGCGGTTTCCGTTCTGCTCACCACAAACTGACAACCCTTGCAT | |
| | | CACATTCCAAGTTCTGCATTCCATCTACAACGACTTCCTCTCTATA | |
| | | GTAGATACTAACAACTATAAAGAATCTTTTGTTGCTGCATTACCAA | |
| | | CAAAAGTATCTACTGACTGGGGCAAAAGACTAAACACCTTTAGAA | |
| | | CAGAGGGATGCTATTCACACCCCAAATTACATAAAAAAGCTGTAA | |
| | | CAGCTGCTACAGATACAGAATACTTTACAAAGCCAGATGGTCTGT | |
| | | GGGGAGACACTATATTTGATGTAGAAAATGGACAAAAAATTATAA | |
| | | AAAATATGGAATCATATGCTAAGTCAGCCAAAGAAAGAGGGATCA | |
| | | ATGGAGACCCTGCTTTCTGTCACTTAACAGGAATATACTCACCTC | |
| | | CCTGGTTAACACCAGGGAGAATATCTCCAGAAACACCTGGACTT | |
| | | TACACAGACGTGACTTACAACCCTTACGCTGACAAAGGAGTGGG | |
| | | CAACAGAATATGGGTTGACTACTGCAGTAAAAAAGGCAACAAATA | |
| | | TGGCAATACAAGTAAATGCCTTTTAGAAGACATGCCACTATGGAT | |
| | | GGTATGCTTTGGCTATGTAGACTGGGTAAAAAAAGAAACCGGCA | |
| | | ACTGGGGCATTCCACTATGGGCTAGAGTACTTATAAGAAGCCCA | |
| | | TATACTGTTCCCAAACTATATAATGAAGCAGACCCAAACTATGGA | |
| | | TGGGTACCTATTTCTTACTATTTTGGAGAAGGCAAAATGCCAAAC | |
| | | GGAGACATGTACGTACCATTTAAAATAAGAATGAAATGGTACCCT | |
| | | TCAATGTGGAACCAAGAGCCAGTATTAAATGACTTAGCAAAGAG | |
| | | CGGACCGTTTGCATACAAAAACACCAAAACAAGTGTGACTGTGA | |
| | | CTGCCAAATATAAATTCACATTTAACTTCGGGGGCAACCCCGTAC | |
| | | CCTCACAGATTGTACAAGATCCCTGCACACAGCCCACCTACGAC | |
| | | ATCCCCGGCACCGGTAACCTGCCTCGCAGAATACAAGTCATTGA | |
| | | CCCGAAAGTCCTCGGTCCCCACTATTCCTTCCACCGGTGGGACT | |
| | | TCAGACGTGGCCTGTTTGGCTCACAAGCTATTAAGAGAGTGTCA | |
| | | GAACAATCAACAACTTCTGAGTTTTTATTCTCAGGCCCAAAGAAA | |
| | | CCCAGAATCGATCAAGGTCCTTACATCCCGCCAGAAAAAGGCTC | |
| | | AGGTTCACTCCAAAGAGAACCGAGACCGTGGAGCAGCTCGGAG | |
| | | ACCGAGGCAGAGACAGAAGCCCCCTCGGAAGAAGAGCCGGAGA | |
| | | ACCAAGAAGAACAAGTACTCCAGTTGCAGCTCAGACAGCAGCTC | |
| | | CGAGAACAGCGAAAACTCAGACAGGGAATCCAGTGCCTATTCGA | |
| | | GCAACTAATAACAACTCAGCAGGGGGTCCACAAAAACCCATTGT | |
| | | TAGAGTAG | |
| ABD34302.1 | DQ187002.1 | ATGGCATGGAGATGGTGGAAGCGACGGAGGCGCTGGTGGTTCC | 205 |
| | | GCAAGCGGTGGACCCGTGGCAGACTTCGCAGACGATGGCCTCG | |
| | | ACCAGCTCGTCGCCGACCTAAACGACGAAGAGTAAGGAGACGC | |
| | | AGACGTTGGAGGAGGGAGCGACCCAGACGTAGACTGTACCGAC | |
| | | GCTACAGACGCAAAAAACGTAGGAGACGAAAGCCCAAAATAATC | |
| | | TTAAAACAATGGCAGCCAGACATTGTAAAGAGGTGCTACATAGT | |
| | | GGGCTACATTCCTGCCATAATATGTGGGGCGGGCACCTGGTCTC | |
| | | ACAACTACACCAGCCACCTTCTAGACATTATCCCCAAGGGACCC | |
| | | TTTGGAGGAGGGCACAGCACTATGAGGTTCTCCCTAAAAGTACT | |
| | | CTTTGAAGAACACCTCAGGCACTTAAACTTTTGGACAAAGAGTAA | |
| | | CCAGGACCTAGAACTGATAAGATACTTTAGATGCTCCTTTAAATT | |
| | | TTATAGAGACCAAGACACAGACTACATAGTACACTACAGCAGAAA | |
| | | AACTCCCCTGGGAGGCAACAGACTGACAGCACCTAACCTGCACC | |
| | | CAGGGGTACAAATGCTTAGCAAAAACAAAATAATAGTACCTAGCT | |
| | | ATGCTACAAAACCCAAGGGTCCTAGCTATATAAAAGTAACCATAG | |
| | | CACCCCCCACACTGCTAACTGACAAGTGGTACTTTAGCAAAGAC | |
| | | GTTTGTGACACAACCTTGGTTAACTTAGACGTTGTACTCTGCAAG | |
| | | CTGCGGTTTCCGTTCTGCTCACCACAAACTGACAACCCTTGCATC | |
| | | ACATTCCAAGTTCTGCATTCCATCTACAACGACTTCCTCTCTATA | |
| | | GTAGATACTAACAACTATAAAGAATCTTTTGTTGCTGCATTACCAA | |
| | | CAAAAGTATCTACTGACTGGGGCAAAAGACTAAACACCTTTAGAA | |
| | | CAGAAGGATGCTATTCACACCCCAAATTACATAAAAAAGCTGTAA | |
| | | CAGCTGCTACAGATACAGAATACTTTACAAAGCCAGATGGTCTGT | |
| | | GGGGAGACACTATATTTGATGTAGAAAATGGACAAAAAATTATAA | |
| | | AAAATATGGAATCATATGCTAAGTCAGCCAAAGAAAGAGGGATCA | |
| | | ATGGAGACCCTGCTTTCTGTCACTTAACAGGAATATACTCACCTC | |
| | | CCTGGTTAACACCAGGGAGAATATCTCCAGAAACACCTGGACTT | |
| | | TACACAGACGTGACTTACAACCCTTACGCTGACAAAGGAGTGGG | |
| | | CGACAGAATATGGGTTGACTACTGCAGTAAAAAAGGCAACAAAT | |
| | | ATGACAATACAAGTAAATGCCTTTTAGAAGACATGCCACTATGGA | |
| | | TGGTATGCTTTGGCTATGTAGACTGGGTAAAAAAAGAAACCGGC | |
| | | AACTGGGGCATTCCACTATGGGCTAGAGTACTTATAAGAAGCCC | |
| | | ATATACTGTTCCCAAACTATATAATGAAGCAGACCCAAACTATGG | |
| | | ATGGGTACCTATTTCTTACTATTTTGGAGAAGGCAAAATGCCAAA | |
| | | CGGAGACATGTACGTACCATTTAAAATAAGAATGAAATGGTACCC | |
| | | TTCAATGTGGAACCAAGAGCCAGTATTAAATGACTTAGCAAAGAG | |
| | | CGGACCGTTTGCATACAAAAACACCAAAACAAGTGTGACTGTGA | |
| | | CTGCCAAATATAAATTCACATTTAACTTCGGGGGCAACCCCGTAC | |
| | | CCTCACAGATTGTACAAAATCCCTGCACACAGCCCACCTACGAC | |
| | | ATCCCCGGCACCGGTAACCTGCCTCGCAGAACACAAGTCATTGA | |
| | | CCCGAAAGTCCTCGGTCCCCACTATTCCTTCCACCGGTGGGACT | |
| | | TCAGGCGCGGCCTGTTTGGCTCACAAGCTATTAAGAGAGTGTCA | |
| | | GAACAATCAACAACTTCTGAGTTTTTATTCTCAGGCCCAAAGAAA | |
| | | CCCAGAATCGATCAAGGTCCTTACATCCCGCCAGAAAAAGGCTC | |
| | | AGGTTCACTCCAAAGAGAACCGAGACCGTGGAGCAGCTCGGAG | |
| | | ACCGAGGCAGAGACAGAAGCCCCCTCGGAAGAAGAGCCGGAGA | |
| | | ACCAAGAAGAACAAGTACTCCAGTTGCAGCTCAGACAGCAGCTC | |
| | | CGAGAACAGCGAAAACTCAGACAGGGAATCCAGTGCCTATTCGA | |
| | | GCAACTAATAACAACTCAGCAGGGGGTCCACAAAAACCCATTGT | |
| | | TAGAGTAG | |
| ABD34305.1 | DQ187004.1 | ATGGCCTGGGGATGGTGGAAACGCAGACGGCGCCGATGGTGGA | 206 |
| | | GAGGCCTCTGGAGGAGACGCCGCTTTGCCAGAAGACGACCTAG | |
| | | ACGGCCTGCTCGCCGCCCTAGACGACGAAGAGTAAGGAGACGC | |
| | | AGACGGTGGAGGAGGGGGCGACTAAGGAGGCGCGTGTACAAC | |
| | | AGGAGACGCAGGATCAGACGAAAGAGACGCAGACAGAAACTGA | |
| | | CAATAAGACAGTGGCAGCCTGACAAACGCAGGATATGTAGAATT | |
| | | AAAGGCTACCTTCCTGCCATTATATATGGAGACGGGACGTTTTCT | |
| | | AAAAACTATACAAGTCACTTAGAGGACAGAATCTCCAAAGGACC | |
| | | GTTTGGGGGAGGGCACGGGACTGCTAGAATGTCTCTTAAAGTAC | |
| | | TGTATGACGACCACCTAAAAGGACTTAACATATGGACGTATAGTA | |
| | | ACAAGGACTTGGAACTGGTCAGATACATGCACACCACAATTACAT | |
| | | TTTACAGACACCCAGACACAGACTTTATAGCAGTATACAACAGAA | |
| | | AAACACCACTAGGTGGCAACAGATACACAGCACCCTCACTGCAC | |
| | | CCTGGTAACATGATGCTGCAGAGAACTAAAATACTAATCCCTAGC | |
| | | TTTAAAACCAAACCCAGAGGGAGCGGCAAAATTAGAGTAGTAAT | |
| | | AAAACCCCCCACTCTGTTAGTAGATAAGTGGTACTTTCAAAAGGA | |
| | | CATATGCGACGTTACACTGTTTAACCTCAACATTACAGCAGCTAG | |
| | | CCTGCGGTTTCCGTTCTGCTCACCACAAACGAACAACCCTTGTG | |
| | | TAACATTCCAAGTTCTGCATTCTGTGTATGACAAAGCATTAGGCA | |
| | | TTAACACATTTGGTACCAAAGAAACACCAGAAGATCAGCAAATGG | |
| | | AAGATATTAAAAACTGGCTTACCAAAGCTCTAAATACTGCAGGCT | |
| | | TTACTGTACTAAATACATTTAGAACAGAAGGTATATACTCACACC | |
| | | CACAACTAAAAAAACCACCTGAAGGAAGTAACAAACCTAGTGCA | |
| | | GAACAGTACTTTGCTCCACTAGACAGCTTATGGGGAGACAAGAT | |
| | | ATATGTAAATAATAATACTAGTCCTTCACAAACAGAAGCAACAATT | |
| | | CCAGGTATATTAGCCAGAAATGCTTGCACATACTATCAAAAAGCT | |
| | | AAAACAAGCACACTAAGGCAGCACCTAGGCGCTATGGCACACTG | |
| | | TCACCTAACAGGAATTTTTAACCCTGCACTACTAACACAGGGCAG | |
| | | ACTATCACCAGAATTTTTTGGCCTATACAAAGAAATTATTTATAAC | |
| | | CCCTATGATGACAAAGGCAAAGGAAACAGAATATGGATAGACCC | |
| | | ATTAACAAAACCTGACAACATATTTGATGCTAGAAGTAAAGTAGA | |
| | | ACTAGAAGATATGCCTCTTTGGATGGCATGCTTTGGATATAATGA | |
| | | CTGGTGTAAAAAAGAGCTAAATAACTGGGGCCTAGAAGTAGAAT | |
| | | ACAGAGTACTACTAAGATGCCCTTACACATATCCAAAACTGTACA | |
| | | ATGATGCTAACCCAAACTATGGCTATGTACCTATATCCTACAACT | |
| | | TTAGTGCAGGAAAAACTGTAGAAGGGGATCTTTATGTTCCAATAA | |
| | | TGTGGAGAACTAAATGGCATCCAACAATGTACAATCAATCTCCAG | |
| | | TACTAGAAGATTTAGCCATGGCAGGGCCTTTTGCTCCAAAAGAAA | |
| | | AAATACCTAGCAGCACACTTACAATAAAATACAAAGCTAAATTTAT | |
| | | ATTCGGGGGCAATCCTATATCTGAACAGATTGTCAAGGACCCCT | |
| | | GCACCCAGCCCACCTACGAAATTCCCGGAGGCGGTACGCTCCC | |
| | | TCGCAGAATACAAGTCATTAACCCGGAATACATCGGGCCACACT | |
| | | ACTCATTCAAAAGCTTCGACATCAGACGTGGGTACTTTAGCGCG | |
| | | AAGAGTGTTAAAAGAGTGTCAGAACAATCAGACATTACTGAGTTT | |
| | | ATATTCTCAGGTCCAAAAAAGCCAAGGATCGACCAAGACAGGTA | |
| | | CCAAGAAGCAGAAGAACACTCAGATTCTCGACTCCGAGAAGAGA | |
| | | AACCGTGGGAGAGCTCGCAAGAAACAGAGAGCGAAGCCCAAGA | |
| | | AGAAGAGATACAAGAGACAAACATCCAGCTCCAGCTGCAGCACC | |
| | | AGCTCAAAGAGCAACTGCAGCTCAGACGGGGAATCCAGTGCCT | |
| | | CTTCGAGCAACTAACCAAAACCCAGCAGGGAGTCCACATAAACC | |
| | | CTTCCCTCGTGTAG | |
| ABD34307.1 | DQ187005.1 | ATGTCTCTTAAAGTACTGTATGACGACCACCTAAAAGGACTTAAC | 207 |
| | | ATATGGACGTATAGTAACAAGGACTTGGAACTGGTCAGATACAT | |
| | | GCACACCACAATTACATTTTACAGACACCCAGACACAGACTTTAT | |
| | | AGCAGTATACAACAGAAAAACACCACTAGGTGGCAACAGATACA | |
| | | CAGCACCCTCACTGCACCCTGGTAACATGATGCTGCAGAGAACT | |
| | | AAAATACTAATCCCTAGCTTTAAAACCAAACCCAGAGGGAGCGG | |
| | | CAAAATTAGAGTAGTAATAAAACCCCCCACTCTGTTAGTAGATAA | |
| | | GTGGTACTTTCAAAAGGACATATGCGACGTTACACTGTTTAACCT | |
| | | CAACATTACAGCAGCTAGCCTGCGGTTTCCGTTCTGCTCACCAC | |
| | | AAACGAACAACCCTTGTGTAACATTCCAAGTTCTGCATTCTGTGT | |
| | | ATGACAAAGCATTAGGCATTAACACATTTGGTACCAAAGAAACAC | |
| | | CAGAAGATCAGCAAATGGAAGATATTAAAAACTGGCTTACCAAAG | |
| | | CTCTAAATACTGCAGGCTTTACTGTACTAAATACATTTAGAACAG | |
| | | AAGGTATATACTCACACCCACAACTAAAAAAACCACCTGAAGGAA | |
| | | GTAACAAACCTAGTGCAGAACAGTACTTTGCTCCACTAGACAGCT | |
| | | TATGGGGAGACAAGATATATGTAAATAATAATACTAGTCCTTCAC | |
| | | AAACAGAAGCAACAATTCCAGGTATACTAGCCAGAAATGCTTGCA | |
| | | CATACTATCAAAAAGCTAAAACAAGCACACTAAGGCAGCACCTAG | |
| | | GCGCTATGGCACACTGTCACCTAACAGGAATTTTTAACCCTGCAC | |
| | | TACTAACACAGGGCAGACTATCACCAGAATTTTTTGGCCTATACA | |
| | | AAGAAATTATTTATAACCCCTATGATGACAAAGGCAAAGGAAACA | |
| | | GAATATGGATAGACCCATTAACAAAACCTGACAACATATTTGATG | |
| | | CTAGAAGTAAAGTAGAACTAGAAGATATGCCTCTTTGGATGGCAT | |
| | | GCTTTGGATATAATGACTGGTGTAAAAAAGAGCTAAATAACTGGG | |
| | | GCCTAGAAGTAGAATACAGAGTACTACTAAGATGCCCTTACACAT | |
| | | ATCCAAAACTGTACAATGATGCTAACCCAAACTATGGCTATGTAC | |
| | | CTATATCCTACAACTTTAGTGCAGGAAAAACTGTAGAAGGGGATC | |
| | | TTTATGTTCCAATAATGTGGAGAACTAAATGGTATCCAACAATGT | |
| | | ACGATCAATCTCCAGTACTAGAAGATTTAGCCATGGCAGGGCCT | |
| | | TTTGCTCCAAAAGAAAAAATACCTAGCAGCACACTTACAATAAAA | |
| | | TACAAAGCTAAATTTATATTCGGGGCAATCCTATATCTGAACAGA | |
| | | TTGTCAAGGACCCCTGCACCCAGCCCACCTACGAAATTCCCGGA | |
| | | GGCGGTACGCTCCCTCGCAGAATACAAGTCATTAACCCGGAATA | |
| | | CATCGGGCCACACTACTCATTCAAAAGCTTCGACATCAGACGTG | |
| | | GGTACTTTAGCGCGAAGAGTGTTAAAAGAGTGTCAGAACAATCA | |
| | | GACATTACTGAGTTTATATTCTCAGGTCCAAAAAAGCCAAGGATC | |
| | | GACCAAGACAGGTACCAAGAAGCAGAAGAACACTCAGATTCTCG | |
| | | ACTCCGAGAAGAGAAACCGTGGGAGAGCTCGCAAGAAACAGAG | |
| | | AGCGAAGCCCAAGAAGAAGAGATACAAGAGACAAACATCCAGCT | |
| | | CCAGCTGCAGCACCAGCTCAAAGAGCAACTGCAGCTCAGACGG | |
| | | GGAATCCAGTGCCTCTTCGAGCAACTAA | |
| ABD61942.1 | DQ361268.1 | ATGGCCTGGAGATGGTGGTGGAGACGCAGGCGCCCGTGGCGAT | 208 |
| | | GGAGATGGAGGCGAAGGAGACGACCAGCTAGACGCCGAAGAC | |
| | | GTAGAAGACCTGCTCGGCGTGCTAGACGACCCAGAGTAAGGAG | |
| | | ATGGCGCAGGCGCAGGGTGTGGGCGCCCAGGCCATACATAAGA | |
| | | AGGCGCAGGCGAAGCTTCCGTAGAAAAAAAATTAAAATAACTCA | |
| | | GTGGAACCCCGCTGTTACTAAAAAATGTACTGTAACTGGGTACCT | |
| | | ACCAGTTATATACTGTGGAACCGGGGACATAGGAACCACTTTTC | |
| | | AGAACTTTGGCTCTCATATGAATGAGTACAAACAGTATAACGCTG | |
| | | CGGGAGGGGGCTTTAGCACAATGCTTTTTACCATGCAAAACCTG | |
| | | TATGAAGAGTACCAAAAACATAGATGCAGATGGTCTAAAAGCAAT | |
| | | CAAGACCTAGACCTGTGTAGATATCTAGACTGTAAACTAACATTT | |
| | | TACAGATCCCCTAACACAGACTTTATAGTTGGCTACAATAGAAAG | |
| | | CCTCCCTTTATAGACACTCAAATAACAAGATGTACTTTACATCCA | |
| | | GGAATGCTAATACAAGAAAGAAAAAAAGTAATAATACCTAGCTTC | |
| | | CAAACCAGGCCAAAAGGTAGAATAAAACGCAAAATTAAAGTAAG | |
| | | GCCCCCCACCTTATTCACAGACAAATGGTACTTTCAGAGAGACC | |
| | | TCTGTAAAGTTCCTCTTGTAACGGTTTCCGCTTCTGCGGCGAGC | |
| | | CTGCGGTTTCCGTTCGGCTCACCACAAACAGAAAACTATTGCATA | |
| | | TACTTCCAGGTTTTAGATCCCTGGTACCACACCCGCCTGAGCATA | |
| | | ACTGGTGGAAAGCCAGCTGAATATTGGACACAGCTAAAAGCTTA | |
| | | TTTAACTCAAGGCTGGGGCAGGTCAACAAATAATGCAGGATATC | |
| | | AACATGGTCCACTAGGTACTTACTTTAATACACTTAAAACATCAG | |
| | | AACATATTAGACAACCCCCAGCAGATAACTACAAACAAGCAAATA | |
| | | AAGATACTACATACTATGGAAGAGTAGACAGTCACTGGGGAGAT | |
| | | CATGTATACCAACAAACAATAATACAAGCCATGGAAGAAAACCAA | |
| | | AGCAACATGTACACAAAAAGAGCACTTCACACATTCTTAGGCAGT | |
| | | CAATATCTAAACTTTAAATCAGGTCTATTTAGCAGTATATTTCTAG | |
| | | ATAATGCCAGACTAAGCCCAGACTTTAAAGGTATGTACCAAGAAG | |
| | | TTGTTTATAACCCCTTTAATGACAGAGGAGTAGGCAACAAAGTAT | |
| | | GGGTTCAGTGGTGCACAAACGAGGACACAATATTTAAAGACCTA | |
| | | CCAGGCAGAGTTCCTGTGGTAGATTTACCATTGTGGTGCGCGTT | |
| | | AATGGGCTACTCAGACTACTGCAAAAAATATTTCCACGACGATGG | |
| | | CTTCTTAAAAGAGGCCAGAATAACTATAATCAGCCCATACACAAA | |
| | | TCCTCCACTAATTAACAACAAAAATACAAATGAGGGCTTTGTACC | |
| | | CTACAGTTTCTACTTTGGAAAAGGCAGAATGCCAGACGGCAATG | |
| | | GGTACATACCCATAGACTTTAGATTTAACTGGTACCCTTGCATAT | |
| | | TTCACCAAACAAACTGGATAAATGACATGGTTCAATGCGGACCCT | |
| | | TTGCCTACCACGGAGATGAAAAGAACTGTTCTCTCACTATGAAAT | |
| | | ACAAGTTTAAATTTCTATTTGGGGGCAATCCTATCTCACAACAGA | |
| | | CTATCAAAGACCCTTGCCAACAACCCGACTGGCAACTTCCCGGT | |
| | | TCCGGTAGATTCCCTCGCGATGTACAAGTATCGAACCCGCGCTT | |
| | | GCAAACCGAAGGGTCCACGTTCCACGCGTGGGACTTCAGACGG | |
| | | GGTTTCTATGGCAAAAGAGCTATTGAAAGACTGCAGGGACAACA | |
| | | AGATGATGTTACATATATTGCAGGACCTCCAAAAAGGCCCCGCTT | |
| | | CGAGGTCCCAGCCCTGGCTGCCGAAGGAAGCTCAAATACACGC | |
| | | CGATCAGAGTTGCCATGGCAAACCTCAGAAGAAGAAAGCTCGCA | |
| | | AGAAGAAAACTCAGAAGAGACAGAAGAAGAAACCTCGTTATCGC | |
| | | AGCAGCTCAAGCAGCAGTGCATCGAGCAGAAGCTCCTCAAGCG | |
| | | AACGCTCCACCAACTCGTCAAGCAATTAGTAAAGACCCAGTATCA | |
| | | CCTACACGCCCCCATTATCCACTAA | |
| ABU55887.1 | EF538879.1 | ATGGCATGGAGATGGTGGAAGCGACGGAGGCGCTGGTGGTTCC | 209 |
| | | GCAAGCGGTGGACCCGTGGCAGACTTCGCAGACGATGGCCTCG | |
| | | ACCAGCTCGTCGCCGCCCTAGACGACGAAGAGTAAGGAGACGC | |
| | | AGACGGTGGAGGAGGGGGCGACCCAGACGCAGACTGTACCGA | |
| | | CGCTACAGACGCAAAAAACGTAGGAGACGAAAGCCCAAAATAAT | |
| | | CTTAAAACAATGGCAGCCAGACATTGTAAAAAGATGCTATATAAT | |
| | | AGGCTACATTCCTGCCATAATATGTGGGGCTGGCACCTGGTCCC | |
| | | ACAACTACACCAGCCACCTGTTAGACATTATCCCCAAGGGACCC | |
| | | TTTGGAGGAGGGCACAGCACTATGAGATTCTCCCTAAAAGTACT | |
| | | CTTTGAAGAACACCTCAGACACTTAAACTTTTGGACAAAAAGCAA | |
| | | CCAGGACCTAGAACTTATAAGATACTTTAGATGCTCCTTTAAATTC | |
| | | TATAGAGACCAAGACACAGACTACATAGTACACTACAGCAGAAA | |
| | | GACTCCCCTAGGAGGCAACAGACTGACAGCACCTAGCCTACACC | |
| | | CCGGGGTACAGATGCTTAGCAAAAACAAAATATTAGTACCTAGCT | |
| | | ATGCTACAAAACCCAAGGGTGGTAGCTATGTAAAAGTAACCATA | |
| | | GCACCCCCCACACTACTAACTGACAAGTGGTACTTTAGCAAAGA | |
| | | CGTTTGTGACACAACCTTGGTTAACTTAGACGTCGTACTCTGCAA | |
| | | CTTGCGGTTTCCGTTCTGCTCACCACAAACTGACAACCCTTGCAT | |
| | | CACATTCCAAGTTCTGCATTCTTACTACAACGACTACCTCTCTATA | |
| | | GTAGACACCGCCTTATACAAAACCAGCTTTGTAAACAATTTAAGT | |
| | | ACAAAACTAGGTACAACATGGGCAAACAGACTAAACACATTTAGA | |
| | | ACAGAAGGCTGCTACTCACATCCAAAATTGCTCAAAAAAACAGTA | |
| | | ACAGCTGCAAATGACACCAAATATTTTACTACACCAGACGGACTC | |
| | | TGGGGAGATGCAGTATTTGATGTTTCAGACGCAAAAAAACTAACT | |
| | | AAAAACATGGAAAGTTATGCTGCCTCTGCTAACGAAAGAGGCGT | |
| | | ACAAGGAGACCCTGCCTTTTGCCACCTAACAGGCATATTCTCAC | |
| | | CTCCCTGGCTAACACCAGGCAGAATATCTCCTGAAACCCCAGGA | |
| | | CTTTACACAGACGTGACTTACAACCCATACGCAGACAAAGGAGT | |
| | | GGGCAACAGAATATGGGTTGACTACTGTAGTAAAAAAGGCAATA | |
| | | AATATGACAATACAAGTAAATGCGTGTTAGAAGACATGCCACTAT | |
| | | GGATGTTATGCTTTGGCTATGTAGACTGGGTAAAAAAAGAGACT | |
| | | GGCAACTGGGGCATTCCACTATGGGCCAGAGTACTTATAAGAAG | |
| | | CCCATATACTGTCCCAAAACTATACCATGAAAACGACCCTGACTA | |
| | | CGGATGGGTTCCAATTTCCTACTACTTTGGAGAAGGCAAAATGC | |
| | | CAAACGGAGACATGTACGTACCATTTAAAGTAAGAATGAAATGGT | |
| | | ACCCTTCAATGTGGAACCAAGAGCCAGTTTTAAATGACTTAGCAA | |
| | | AGAGCGGACCGTTTGCATACAAGAACACCAAAACAAGCGTGACT | |
| | | GTGACTGCCAAATATAAATTCACATTTAACTTCGGGGGCAACCCC | |
| | | GTACCCTCACAGATTGTACAAGATCCCTGCACACAGCCCACCTA | |
| | | CGACATCCCCGGCACCGGTAACCTGCCTCGCAGAATACAAGTCA | |
| | | TTGACCCGAAAGTCCTCGGTCCCCACTATTCCTTCCACCGGTGG | |
| | | GACTTCAGGCGTGGCCTCTTTGGCACACAAGCTATTAAAAGAGT | |
| | | GTCAGAACAATCAACAACTTCTGAGTTTTTATTCTCAGGCCCAAA | |
| | | GAAACCCAGAATCGATCAAGGCCCTTACATCCCGCCAGAAAAAG | |
| | | GCTCAGGTTCACTCCAAAGAGAATCGAGACCGTGGAGCAGCTC | |
| | | GGAGACCGAGGCAGAGACAGAAGCCCCCTCGGAAGAGGAGCC | |
| | | GGAGAACCAAGAAGAACAAGTACTCCAGTTGCAGCTCAGACAGC | |
| | | AGCTCCGAGAACAGCGAAAACTCAGACAGGGAATCCAGTGCCTA | |
| | | TTCGAGCAACTGATAACAACCCAGCAGGGGGTCCACAAAAACCC | |
| | | ATTGTTAGAGTAG | |
| ABY26045.1 | EU305675.1 | ATGGCCTGGTGGGGACGGTGGAGAAGATGGCGCTGGAGGCCC | 210 |
| | | CGTCGCTGGCGGCGCCGTCGCAGACGCCGAGTACCAAGAAGAA | |
| | | GAGCTCAACGCTCTGTTCGACGCCGTCGAGCAAGAAGAGTAAG | |
| | | GAGGAGGCGATGGGGGAGGCGGAGGTGGAGACGGGGGTACAG | |
| | | ACGCAGACTGAGACTAAGACGCAAACGCAAACGAAAACGCAGAC | |
| | | TTGTACTGACTCAGTGGCACCCCGCTAAAGTAAGGAGGTGCAGA | |
| | | ATATCTGGGGTCCTACCCATGATACTGTGCGGTGCTGGCAGGAG | |
| | | TAGCTTTAACTACGGGCTGCACAGCGATGACTTTACTAAACAGAA | |
| | | ACCAAACAATCAGAACCCGCACGGCGGGGGCATGAGCACTGTG | |
| | | ACTTTTAACCTAAAGGTGCTCTTTGACCAATACGAAAGATTTATG | |
| | | AACAAGTGGTCGTACCCCAACGACCAACTAGACCTCGCCAGATA | |
| | | CAAAGGCTGTAAATTCACCTTCTACAGACACCCAGAAGTTGACTT | |
| | | TCTAGCTCAATATGACAACGTTCCCCCTATGAAAATGGACGAACT | |
| | | GACTGCCCCTAACACTCACCCCGCACTGCTGCTACAGAGCAGAC | |
| | | ACAGGGTAAAGATATACAGCTGGAAAACCAGGCCATTTGGCTCT | |
| | | AAAAAAGTAACAGTAAAAATAGGACCCCCCAAACTGTTTGAAGAC | |
| | | AAGTGGTACAGCCAGTCTGACTTGTGCAAAGTTTCCCTTGTCAGT | |
| | | TGGCGGTTAACCGCATGTGACTTCAGGTTTCCGTTCTGCTCACC | |
| | | ACAAACTGACAACCCTTGTGTAACCTTCCAGGTGCTAGGAGAAC | |
| | | AGTATTACGAAGTCTTTGGAACTTCCGTATTGGACGTTCCTGCAT | |
| | | CCTATAACTCACAAATAACTACATTTGAACAATGGCTATATAAAAA | |
| | | ATGCACCCACTATCAAACATTCGCCACAGACACCAGATTAGCCC | |
| | | CCCAAAAGAAAGCAACCACATCCACCAACCACACATATAACCCC | |
| | | AGTGGCAACACTGAATCATCAACATGGACACAAAGTAACTACTCC | |
| | | AAATTTAAACCAGGCAACACAGACAGCAACTATGGCTACTGCAG | |
| | | TTATAAAGTAGACGGCGAAACATTTAAGGCCATTAAAAATTACAG | |
| | | AAAGCAAAGATTCAAATGGCTAACCGAATACACAGGAGAGAATC | |
| | | ACATAAACAGCACATTTGCAAAGGGCAAATATGATGAATACGAGT | |
| | | ACCACCTAGGGTGGTACTCTAACATATTTATAGGCAACCTTAGAC | |
| | | ACAACCTGGCATTCCGCTCAGCATACATAGATGTAACTTACAACC | |
| | | CCACAGTAGACAAAGGCAAAGGCAACATAGTGTGGTTCCAGTAC | |
| | | CTGACAAAACCCACCACACAGCTGATAAGAACACAGGCAAAATG | |
| | | CGTTATAGAAGACCTGCCACTTTACTGTGCCTTTTTTGGCTACGA | |
| | | GGACTATATACAGAGAACACTAGGCCCTTACCAGGACATAGAGA | |
| | | CAGTAGGCGTCATCTGCTTTATAAGCCCCTACACAGAACCTCCAT | |
| | | GTATTAGAAAAGAAGAGCAAAAAAAGGACTGGGGCTTTGTATTTT | |
| | | ATGACACCAACTTTGGAAACGGAAAAACACCAGAGGGCATAGGC | |
| | | CAAGTTCACCCCTACTGGATGCAGAGGTGGAGAGTAATGGCCCA | |
| | | GTTTCAAAAAGAAACTCAAAACAGAATTGCCAGGAGCGGACCGT | |
| | | TTAGCTACAGAGACGACATACCCTCAGCCACACTGACTGCCAAC | |
| | | TACAAGTTCTACTTTAACTGGGGGGGCGACTCTATATTTCCACAG | |
| | | ATTATTAAGAACCCCTGCCCCGACACCGGGCTGCGACCCAGTG | |
| | | GCCATAGAGAGCCTCGCTCAGTACAAGTCGTTAGCCCGCTCACC | |
| | | ATGGGACCAGAGTTCATATTCCACCGCTGGGACTGGCGACGGG | |
| | | GGTTCTATAATCCAAAAGCTCTCAAACGAATGCTTGAAAAATCAG | |
| | | ATAATGATGCAGAGTCTTCAACAGGCCCAAAAGTGCCTCGGTGG | |
| | | TTTCCAGCACACCACGACCAAGAGCAAGAAAGCGACTTCGATTC | |
| | | ACAAGAGACAAGGTCGCAGTCCTCGCAAGAAGAAGCCGCTCAA | |
| | | GAAGCCCTCCAAGACGTCCAAGAGACGTCGGTACAGCAGTACCT | |
| | | CCTCAAGCAGTTCCGAGAGCAGCGGCTACTCGGACAGCAACTC | |
| | | CGCCTCCTCATGCTCCAACTCACCAAGACGCAAAGCAATCTCCA | |
| | | CATAAATCCCCGTGTCCTTGACCATGCATAA | |
| ABY26046.1 | EU305676.1 | ATGTTCTGGTGGGGATGGCGCCGCCGATGGTGGTGGAAGCCAC | 211 |
| | | GGAGGCGATGGAGACGCAGGAGGGCGCGCCGCCCGAGACGAG | |
| | | TACCGCGAAGACGATATAGAAGAGCTGCTCGCCGCTATCGAGG | |
| | | CAGACGAGTAAGGAGGCGCCGCGCGGGGGGCTGGCGGGGGC | |
| | | GACGTAGATACTCCCGACACTATAGCAGACGACTGACTGTCAGG | |
| | | CGAAAGAAAAAGAAACTGACTCTTAAGATCTGGCAGCCACAGAA | |
| | | TATCAGGAAATGTAGAATAAGGGGTCTCCTGCCCCTCCTGATAT | |
| | | GCGGGCACACCCGTTCGGCCTTTAACTATGCCATCCACTCGGAT | |
| | | GACAAGACCCCCCAACAGGAGAGTTTCGGGGGCGGCCTCAGCA | |
| | | CCGTCAGCTTCTCCTTAAAAGTACTGTTTGACCAGAACCAGAGG | |
| | | GGACTTAATAGGTGGTCGGCCAGCAACGACCAACTGGACCTTGC | |
| | | TCGGTACCTGGGGTGCACTTTCTGGTTCTACAGAGACAAAAAGA | |
| | | CTGATTTTATAGTGCAGTATGATATCAGCGCCCCCTTCAAGCTGG | |
| | | ACAAAAACAGCAGTCCCAGCTACCACCCCTTCATGCTCATGAAG | |
| | | GCAAAACACAAGGTGCTAATTCCCAGCTTTGACACTAAACCCAA | |
| | | GGGCAGGGAAAAAATTAAAGTTAGAATACAGCCCCCCAAAATGT | |
| | | TCATAGACAAGTGGTACACACAAGAGGACCTGTGTCCCGTTATT | |
| | | CTTGTGTCACTTGCGGTTAGCGTAGCTTCCTTTACACATCCGTTC | |
| | | TGCTCACCACAAACTGCCAATCCTTGCATCACCTTCCAGGTTTTG | |
| | | AAAGAGTTCTATTACCCAGCCATGGGCTATGGGGCCCCTGAAAC | |
| | | AACTGTCACTTCTGTATTTAACACTTTATATACCACAGCCACCTAC | |
| | | TGGCAGTCTCACCTTACCCCCCAGTTTGTCAGAATGCCCACCAA | |
| | | AAACCCAGACAATACTGAAAACAACCAAGCTCAAGCCTTTAATAC | |
| | | CTGGGTTGATAAAGATTTCAAAACAGGCAAGTTAGTAAAGTATAA | |
| | | CTTTCCCCAGTATGCTCCTTCAATAGAGAAACTAAAACAATTAAG | |
| | | AACATACTACTTTGAATGGGAAACTAAACACACTGGGGTTGCAG | |
| | | CACCACCTACCTGGACCACCCCTACCTCAGACAGATACGAGTAC | |
| | | CATATGGGAATGTTCAGTCCCACTTTCCTCACACCGTTCAGGTCA | |
| | | GCTGGCCTAGACTTTCCCGGAGCCTACCAGGACGTCACCTACAA | |
| | | TCCCCTCACAGACAAGGGGGTGGGCAACAGAATGTGGTTCCAAT | |
| | | ACAACACCAAGATAGACACTCAGTTCGACGCCAGGTCCTGCAAG | |
| | | TGCGTACTAGAGGACATGCCCCTGTACGCCATGGCCTACGGGTA | |
| | | TGCAGACTTTTTAGAGCAAGAGATAGGAGAGTACCAGGACCTAG | |
| | | AGGCCAACGGGTACGTCTGTGTAATAAGCCCCTACACCAAACCC | |
| | | CCAATGTTCAACAAACACAACCCGCAACAGGGGTACGTATTCTAT | |
| | | GACTCTCAGTGGGGCAACGGCAAGTGGATAGACGGAACCGGGT | |
| | | TCGTGCCCGTCTACTGGCTGACCAGATGGAGAGTAGAGCTGCTA | |
| | | TTTCAGAAAAAAGTACTGTCAGACATCGCCATGTCAGGCCCCTTC | |
| | | AGCTACCCAGACGAACTTAAAAACACTGTACTGACGGCCAAATA | |
| | | CAGATTTGACTTTAAGTGGGGTGGCAATCTCTTCCACCAGCAGA | |
| | | CCATTAGAAACCCCTGCAAACCAGAAGAGACCTCGACCGGTAGA | |
| | | GTCCCTCGCGATGTACAAGTCGTTGACCCGGTCACCATGGGCCC | |
| | | CAGATTCGTCTTTCACTCCTGGGACTGGAGGCGAGGGTTCCTTA | |
| | | GTGACAGAGCTCTCAAAAGAATGTTTGAAAAACCGCTCGATCTTG | |
| | | AGGGATTTGCAGCGTCTCCAAAACGACCTCGCATATTCCCTCCC | |
| | | ACAGAGGGACAGCTCGCCCGAGAGCAAAAAGAGCAAGAAGAAA | |
| | | GCTCAGATTCGCAGGAAGAAAGCAGCCTTACCTCGCTCGAAGAA | |
| | | GTCCCGGAAGAGACGAAGCTACGACTCCACCTCAGAAAGCAGC | |
| | | TCAGAGAGCAGCGAAGCATCAGACAGCAACTCCGAACCATGTTC | |
| | | CAGCAACTTGTCAAGACGCAAGCGGGCCTACACCTAAACCCCCT | |
| | | TTTATCTTCCCAGCTGTAA | |
| ACK44071.1 | FJ426280.1 | ATGGCCTGGCGATGGTGGTGGCAGAGACGATGGCGCCGCCGC | 212 |
| | | CCGTGGCCCCGCAGACGGTGGAGACGCCTACGACGCCGGAGA | |
| | | CCTCGACGACCTGTTCGCCGCCGTCGAAGACGAGCAACAGTAA | |
| | | GGAGGCGGAGGTGGAGGGGCAGACGTGGGCGACGCACATACA | |
| | | CCCGACGCGCGGTCAGACGCAGACGCAGACCCAGAAAGAGATT | |
| | | TGTACTGACTCAGTGGAGCCCCCAGACAGCCAGAAACTGTTCAA | |
| | | TAAGGGGCATAGTGCCCATGGTAATATGCGGACACACCAGAGCA | |
| | | GGTAGAAACTATGCCCTTCACAGCGAGGACTTTACCACTCAGAT | |
| | | AAGACCCTTTGGAGGCAGCTTCAGCACAACCACCTGGTCCCTAA | |
| | | AAGTACTGTGGGACGAACACCAGAAATTCCAAAACAGATGGTCC | |
| | | TACCCAAACACACAGCTGGACCTAGCCAGGTACAGGGGGGTCA | |
| | | CCTTCTGGTTCTACAGAGACCAGAAAACAGACTATATAGTACAAT | |
| | | GGAGCAGAAATCCTCCCTTTAAACTAAACAAATACAGCAGCCCC | |
| | | ATGTACCACCCTGGAATGATGATGCAGGCAAAAAAGAAACTGGT | |
| | | GGTCCCCAGTTTCCAGACCAGACCTAAAGGCAAAAAGAGATACA | |
| | | GAGTCAGAATAAGACCCCCCAACATGTTCAATGACAAGTGGTAC | |
| | | ACTCAAGAGGACCTTTGTCCAGTACCTCTTGTGCAAATTGTGGTT | |
| | | TCTGCGGCTACCCAGACAAAAAAGAACTGCTCACCACAAACGAA | |
| | | CAACCCTTGCATCACTTTCCAGGTTTTGAAAGACAAGTACTTAAA | |
| | | CTACATAGGAGTTAACTCTTCCGAGACCCGAAGAAACAGTTATAA | |
| | | AACTCTACAAGAGAAACTTTACTCACAATGCACATACTTTCAAAC | |
| | | CACACAAGTTTTAGCTCAATTATCTCCAGCATTTCAGCCCGCAAA | |
| | | GAAACCTAACAGAACCAACAACTCAACCAGCACAACACTAGGCA | |
| | | ACAAAGTCACAGACCTAAAATCCAACAATGGCAAATTCCACACAG | |
| | | GCAACAACCCAGTGTTTGGCATGTGTTCATATAAACCCAGCAAG | |
| | | GACATACTATATAAAGCAAACGAATGGTTGTGGGACAATCTCATG | |
| | | GTTGAAAATGATTTACATTCCACATATGGCAAGGCAACCCTTAAA | |
| | | TGCATGGAGTACCACACAGGCATTTACAGCTCCATATTCCTAAGT | |
| | | CCTCAAAGGTCCCTAGAATTCCCAGCAGCATACCAAGATGTCAC | |
| | | ATACAACCCAAACTGTGACAGAGCCATAGGCAACCGTGTATGGT | |
| | | TCCAATATGGCACAAAAATGAACACAAACTTTAATGAACAACAGT | |
| | | GTAAGTGTGTGTTAACAAACATTCCCCTGTGGGCGGCCTTTAAC | |
| | | GGCTACCCAGACTTTATAGAACAAGAACTCGGTATCAGCACAGA | |
| | | GGTACACAACTTTGGCATAGTATGTTTCCAGTGCCCCTACACCTT | |
| | | TCCCCCACTCTATGACAAAAAGAACCCAGATAAAGGCTACGTATT | |
| | | TTATGACACCACCTTTGGGAACGGAAAAATGCCAGACGGGTCAG | |
| | | GCCACATTCCCATCTACTGGCAGCAGAGATGGTGGATCAGACTA | |
| | | GCCTTTCAAGTACAAGTCATGCATGACTTTGTACTCACTGGCCCC | |
| | | TTTAGCTACAAAGATGACCTAGCAAACACTACACTAACAGCCAGG | |
| | | TACAAGTTCAGATTCAAATGGGGCGGTAATATCATCCCCGAACA | |
| | | GATTATCAAGAACCCGTGTAAGAGAGAACAGTCCCTCGGTTCCT | |
| | | ACCCCGATAGACAACGTCGCGACCTACAAGTTGTTGACCCATCA | |
| | | ACCATGGGCCCGATCTACACCTTCCACACATGGGACTGGCGAC | |
| | | GGGGGCTTTTTGGTGCAGATGCTATCCAGAGAGTGTCACAAAAA | |
| | | CCGGAAGATGCTCTCCGCTTTACAAACCCTTTCAAGAGACCCAG | |
| | | ATATCTTCCCCCGACAGACGGAGAAGACTACCGACAAGAAGAAG | |
| | | ACTTCGCTTTACAGGAAAGAAGACGGCGCACATCCACAGAAGAA | |
| | | GTCCAGGACGAGGAGAGCCCCCCGCAAAACGCGCCGCTCCTAC | |
| | | AGCAGCAGCAGCAGCAGCGGGAGCTCTCAGTCCAGCACGCGGA | |
| | | GCAGCAGCGACTCGGAGTCCAACTCCGATACATCCTCCAAGAAG | |
| | | TCCTCAAAACGCAAGCGGGTCTCCACCTAAACCCCCTATTATTAG | |
| | | GCCCGCCACAAACAAGGTGTATATCTTTGAGCCCCCCAGAGGCC | |
| | | TACTCCCCATAG | |
| ACR20257.1 | FJ392105.1 | ATGGCAGCCTGGTGGTGGGGCAGGCGGAGACGCTGGCGCAGG | 213 |
| | | TGGAGGCGCCGCCGCCTCCCTCGCCGCCGCCGCTGGCGACGG | |
| | | AGGAGACGGTGGCCCAGAAGACGCAGGCGGAGATGGCCGCGC | |
| | | AGACGCAGACGTCGCAGACCTGCTCGCCGCCCTAGAAGGAGAC | |
| | | GCAGACGCCGAAGGGTAAGGAGACCTCGCCGGCGCCAAAAACT | |
| | | GGTACTGACTCAGTGGAACCCTCAGACAGTTAGAAAGTGCATTA | |
| | | TCAGAGGGTTCGTGCCGCTGTTCCAGTGCAGCAGAACTGCCTAC | |
| | | CACAGGAACTTTGTAGACCACATGGACGACGTGTACACCACGGG | |
| | | TCCCTTCGGGGGCGGCACGGGGTCCATGCTTTTCACCCTGAGC | |
| | | TTCTTCTACCACGAGTTTAAAAAGCACCACTGCAAGTGGTCCGCC | |
| | | AGCAACAGAGACTTTGACTTGTGTAGATACAGGGGCACGGTTCT | |
| | | AAAGTTTTATAGACATCCAGACGTAGACTACATAGTTTGGCTGAA | |
| | | CAGAAACCCCCCTTTCCAGGAAAACCTATTAGACGCCATGAGCA | |
| | | GACAGCCCCTCATAATGTTACAGACTCACAAGTGCATACTGGTG | |
| | | AGGAGCTTTAAAACGCACCCCAGGGGACCCTCGTACGTCAGAAT | |
| | | GAAAGTTAGACCCCCGAGACTACTTACAGACAAGTGGTACTTTC | |
| | | AGTCAGACTTCTGCAACGTTCCGCTTTTCCAGCTACAGTTTGCTC | |
| | | TTGCGGAACTGCGGTTTCCGATCGGCTCACCACAAACGAACACC | |
| | | ACTTGTGTAAACTTCCTGGTGTTAGATAACAGGTACCACTTATTTT | |
| | | TAGATAACAAACCACAACAGTCAGACAACTCACAAAGAGAAGAG | |
| | | AGGGGGCACGGTTATCCCTTTAACGGTAGTGAGGGAGAAGCTG | |
| | | ATAGACTAAAATTCTGGCACAGTTTGTGGAATACAGGCAGATTCC | |
| | | TAAACACCACTCACATTAACACCCTACAGCCAAACATCTCTAAAT | |
| | | TACAAGAACATAAAGCTGAAGACACAGAGGCAAAAACTACCTATA | |
| | | AAAGTTTAATTAACGGTAACAAAAAGGTATATAACGATAGTCAATA | |
| | | CATGCAAAACGTTTGGGCACAAAACAAAATAAATACCCTTTATGA | |
| | | GGCTATAGCAGAAGAACAATACAGAAAAATACAAAAGTACTATAA | |
| | | CACCACATACGGGCAGTACCAAAGGCAACTATTTACAGGCAAGA | |
| | | AGTACTGGGACTACAGAGTAGGCATGTTCAGTCCCACCTTCCTA | |
| | | AGTCCCAGCAGACTAAATCCAGAGATGCCAGGTGCCTACACAGA | |
| | | GATAGCCTATAACCCCTGGACAGACGAGGGCACGGGCAACGTT | |
| | | GTGTGCCTGCAGTACCTAACAAAAGAAACCTCAGACTACAAGCC | |
| | | ACACGCAGGTAGCAAATTCACCATAGAGGACGTACCCCTGTGGA | |
| | | TAGCCATGAATGGGTACGTGGACATATGTAAAAAAGAGGGCAAA | |
| | | GATCCAGGCATAAGACTAAACTGCCTTATGTGTATAAGGTGCCC | |
| | | GTACACCAGGCCCAAACTTTACAACCCCAGATACCCCAAAGAAC | |
| | | TGTTTGTAGTGTACTCTTACAACTTTGCCCACGGGCGCATGCCC | |
| | | GGGGGGGACAAATACATACCCATGGAGTTTAAGGACAGGTGGTA | |
| | | CCCGTCGCTCATGCACCAGGAAGAGGTCATAGAGGACATAGTCA | |
| | | GGAGCGGCCCCTTTGCCCTAAAAGACCAGACAGAGATGGTTACT | |
| | | TGCATGATGAGGTACTCGGCCCTGTTTAACTGGGGCGGTAATAT | |
| | | TATCCGCGAACAGGCCGTGGAAGACCCCTGTAAAAAGAACACCT | |
| | | TTGCCCTTCCCGGAGCCAGTGGAGTCGCTCGCCTACTACAAGTC | |
| | | AGCAACCCGATCAGGCAGACCCCCAGCACCACCTGGCACTCGT | |
| | | GGGACTGGAGAAGGTCCCTCTTTACACAAACGGGTATTAAAAGA | |
| | | ATGCGCGAACAACAACCGTATGATGAAATTACTTATGCAGGGCC | |
| | | TAAGAGGCCAAAACTCACAGTTCCCGCAGGACCCACCCTCGCTG | |
| | | CCGGAGACGCCTACAACTACTGGGAAAGAAAACCGCTCACCTCG | |
| | | CCCGGAGAGACGCTCCCGACCCAGACGGAGACAGAGACAGAAG | |
| | | CCCCAGAGGAAGAAGCCCAGCAAGAAGAAGTCCAGGAGGGCCT | |
| | | CCAGCTCCAGCAGCTCTGGGAGCAGCAACTCCAGCAAAAGCGA | |
| | | CAGCTGGGAGTCATGTTCCAGCAACTCCTCCGACTCAGAACGGG | |
| | | GGCGGAAATACACCCGGCCCTCGCATAG | |
| ACR20260.1 | FJ392107.1 | ATGGCAGCCTGGTGGTGGGGCAGGCGGAGACGCTGGCGCAGG | 214 |
| | | TGGAGGCGCCGCCGCCTCCCTCGCCGCCGCCGCTGGCGACGG | |
| | | AGGAGACGGTGGCCCAGAAGACGCAGGCGGAGATGGCCGCGC | |
| | | AGACGCAGACGTCGCAGACCTGCTCGCCGCCCTAGAAGGAGAC | |
| | | GCAGACGCCGAAGGGTAAGGAGACCTCGCCGGCGCCAAAAACT | |
| | | GGTACTGACTCAGTGGAACCCTCAGACAGTTAGAAAGTGCATTA | |
| | | TCAGAGGGTTCGTGCCGCTGTTCCAGTGCAGCAGAACTGCCTGC | |
| | | CACAGGAACTTTGTAGACCACATGGACGACGTGTACACCACGGG | |
| | | TCCCTTCGGGGGCGGCACGGGGTCCATGCTTTTCACCCTGAGC | |
| | | TTCTTCTACCACGAGTTTAAAAAGCACCACTGCAAGTGGTCCGCC | |
| | | AGCAACAGAGACTTTGACTTGTGTAGATACAGGGGCACGGTTCT | |
| | | AAAGTTTTATAGACATCCAGACGTAGACTACATAGTTTGGCTGAA | |
| | | CAGAAACCCCCCTTTCCAGGAAAACCTATTAGACGCCATGAGCA | |
| | | GACAGCCCCTCATAATGTTACAGACTCACAAGTGCATACTGGTG | |
| | | AGGAGCTTTAAAACGCACCCCAGGGGACCCTCGTACGTCAGAAT | |
| | | GAAAGTTAGACCCCCGAGACTACTTACAGACAAGTGGTACTTTC | |
| | | AGTCAGACTTCTGCAACGTTCCGCTTTTCCAGCTACAGTTTGCTC | |
| | | TTGCGGAACTGCGGTTTCCGATCGGCTCACCACAAACGAACACC | |
| | | ACTTGTGTAAACTTCCTGGTGTTAGATAACAGGTACCACTTATTTT | |
| | | TAGATAACAAACCACAACAGTCAGAGAACCTACAAAGAAAAGAG | |
| | | AGGGGGCACGGTTATTCCTTTACGGGTAATGAGGGAGAAGTTGA | |
| | | TAGACTAAAATTCTGGCACAGTTTGTGGAATACAGGCAGATTCCT | |
| | | AAACACCACTCACATTAACACCCTACTGCCAAACATCTCTAAATT | |
| | | ACAAGAACATAAAGCTGAAGACAGACAGGCAAATGCTAAGTATA | |
| | | AAAATTTAATTAACGGTAACAAAAAGGTATATAACGATAGTCAATA | |
| | | CATGCAAAACGTTTGGGAAGAAAACAAAATAAATACCCTTTATGA | |
| | | CGCTATAGCAGAAGAACAATACAGAAAAATACAAAAGTACTATAA | |
| | | CACCACATACGGGCAGTACCAAAGGCAACTATTTACAGGCAAGA | |
| | | AGTACTGGGACTACAGAGTAGGCATGTTCAGTCCCACCTTCCTA | |
| | | AGTCCCAGCAGACTAAATCCAGAGATGCCAGGTGCCTACACAGA | |
| | | GATAGCCTATAACCCCTGGACAGACGAGGGCACGGGCAACGTT | |
| | | GTGTGCCTGCAGTACCTAACAAAAGAAACCTCAGACTACAAGCC | |
| | | ACACGCAGGTAGCAAATTCACCATAGAGGACGTACCCCTGTGGA | |
| | | TAGCCATGAACGGGTACGTGGACATATGTAAAAAAGAGGGCAAA | |
| | | GATCCAGGCATAAGACTAAACTGCCTTATGTGTATAAGGTGTCC | |
| | | GTACACCAGGCCCAAACTTTACAACCCCAGATACCCCGAAGAAC | |
| | | TGTTTGTAGTGTACTCTTACAACTTTGCCCACGGGCGCATGCCC | |
| | | GGGGGGGACAAATACATACCCATGGAGTTTAAGGACAGGTGGTA | |
| | | CCCGTCGCTCATGCACCAGGAAGAGGTCATAGAGGACATAGTCA | |
| | | GGAGCGGCCCCTTTGCCCTAAAAGACCAGACAGAGATGGTTACT | |
| | | TGCATGATGAGGTACTCGGCCCTGTTTAACTGGGGCGGTAATAT | |
| | | TATCCGCGAACAGGCCGTGGAAGACCCCTGTAAAAAGAACACCT | |
| | | TTGCCCTTCCCGGAGCCAGTGGAGTCGCTCGCCTACTACAAGTC | |
| | | AGCAACCCGATCAGGCAGACCCCCAGCACCACCTGGCACTCGT | |
| | | GGGACTGGAGAAGGTCCCTCTTTACACAAACGGGTATTAAAAGA | |
| | | ATGCGCGAACAACAACCGTATGATGAAATTACTTATGCAGGGCC | |
| | | TAAGAGGCCAAAACTCACAGTTCCCGCAGGGCCCACCCTCGCT | |
| | | GCCGGAGACGCCTACAACTACTGGGAAAGAAAACCGCTCACCTC | |
| | | GCCCGGAGAGACGCTCCCGACCCAGACGGATACAGAGACAGAA | |
| | | GCCCCAGAGGAAGAAGCCCAGCAAGAAGAAGTCCAGGAGGGCC | |
| | | TCCAGCTCCAGCAGCTCTGGGAGCAGCAACTCCAGCAAAAGCG | |
| | | ACAGCTGGGAGTCATGTTCCAGCAACTCCTCCGACTCAGAACGG | |
| | | GGGCGGAAATACACCCGGCCCTCGCATAG | |
| ACR20262.1 | FJ392108.1 | ATGGCAGCCTGGTGGTGGGGCAGGCGGAGACGCTGGCGCAGG | 215 |
| | | TGGAGGCGCCGCCGCCTCCCTCGCCGCCGCCGCTGGCGACGG | |
| | | AGGAGACGGTGGCCCAGAAGACGCAGGCGGAGATGGCCGCGC | |
| | | AGACGCAGACGTCGCAGACCTGCTCGCCGCCCTAGAAGGAGAC | |
| | | GCAGACGCCGAAGGGTAAGGAGACCTCGCCGGCGCCAAAAACT | |
| | | GGTACTGACTCAGTGGAACCCTCAGACAGTTAGAAAGTGCATTA | |
| | | TCAGAGGGTTCGTGCCGCTGTTCCAGTGCAGCAGAACTGCCTAC | |
| | | CACAGGAACTTTGTAGACCACATGGACGACGTGTACACCACGGG | |
| | | TCCCTTCGGGGGCGGCACGGGGTCCATGCTTTTCACCCTGAGC | |
| | | TTCTTCTACCACGAGTTTAAAAAGCACCACTGCAAGTGGTCCGCC | |
| | | AGCAACAGAGACTTTGACTTGTGTAGATACAGGGGCACGGTTCT | |
| | | AAAGTTTTATAGACATCCAGACGTAGACTACATAGTTTGGCTGAA | |
| | | CAGAAACCCCCCTTTCCAGGAAGACCTATTAGACGCCATGAGCA | |
| | | GACAGCCCCTCATAATGTTACAGACTCACAAGTGCATACTGGTG | |
| | | AGGAGCTTTAAAACGCACCCCAGGGGACCCTCGTACGTCAGAAT | |
| | | GAAAGTTAGACCCCCGAGACTACTTACAGACAAGTGGTACTTTC | |
| | | AGTCGGACTTCTGCAACGTTCCGCTTTTCCAGCTACAGTTTGCTC | |
| | | TTGCGGAACTGCGGTTTCCGATCGGCTCACCACAAACGAACACC | |
| | | ACTTGTGTAAACTTCCTGGTGTTAGATAACAGGTACCACTTATTTT | |
| | | TAGATAACAAACCACAACAGTCAGACAACCCACAAAGAAAAGAG | |
| | | AGGGGGCACGGTTATTCCTTTACGGGTAATGAGGGAGAAATGGA | |
| | | TAGAGAAAGATTCTGGCACAGTTTGTGGAGTACAGGCAGATTCC | |
| | | TAAACACCACTCACATTAACACCCTACTGCCAAACATCTCTAAAT | |
| | | TACAAGACCATAAAGCTGAAGACAAAGACGCAAAAACTACCTATA | |
| | | AAAGTTTAATTAACGATAACAAAAAGGTATATAACGATAGTCAATA | |
| | | CATGCAAAACGTTTGGGACCAAAACAAAATACATACCCTTTATAT | |
| | | GGCTATAGCAGAAGAACAATACAGAAAAATACAAAAGTACTATAA | |
| | | CACCACATACGGGCAGTACCAAAGGCAACTATTTACAGGCAAGA | |
| | | AGTACTGGGACTACAGAGTAGGCATGTTCAGTCCCACCTTCCTA | |
| | | AGTCCCAGCAGACTAAATCCAGAGATGCCAGGTGCCTACACAGA | |
| | | GATAGCCTATAACCCCTGGACAGACGAGGGCACGGGCAACGTT | |
| | | GTGTGCCTGCAGTACCTAACAAAAGAAACCTCAGACTACAAGCC | |
| | | ACACGCAGGTAGCAAATTCACCATAGAGGACGTACCCCTGTGGA | |
| | | TAGCCATGAACGGGTACGTGGACATATGTAAAAAAGAGGGCAAA | |
| | | GATCCAGGCATAAGACTAAACTGCCTTATGTGTATAAGGTGTCC | |
| | | GTACACCAGGCCCAAACTTTACAACCCCAGATACCCCGAAGAAC | |
| | | TGTTTGTAGTGTACTCTTACAACTTTGCCCACGGGCGCATGCCC | |
| | | GGGGGGGACAAATACATACCCATGGAGTTTAAGGACAGGTGGTA | |
| | | CCCGTCGCTCATGCACCAGGAAGAGGTCATAGAGGACATAGTCA | |
| | | GGAGCAGCCCCTTTGCCCTAAAAGACCAGACAGAGATGGTTACT | |
| | | TGCATGATGAGGTACTCGGCCCTGTTTAACTGGGGCGGTAATAT | |
| | | TATCCGCGAACAGGCCGTGGAAGACCCCTGTAAAAAGAACACCT | |
| | | TTGCCCTTCCCGGAGCCAGTGGAGTCGCTCGCCTACTACAAGTC | |
| | | AGCAACCCGATCAGGCAGACCCCCAGCACCACCTGGCACTCGT | |
| | | GGGACTGGAGAAGGTCCCTCTTTACACAAACGGGTATTAAAAGA | |
| | | ATGCGCGAACAACAACCGTATGATGAAATTACTTATGCAGGGCC | |
| | | TAAGAGGCCAAAACTCACAGTTCCCGCAGGGCCCACCCTCGCT | |
| | | GCCGGAGACGCCTACAACTACTGGGAAAGAAAACCGCTCACCTC | |
| | | GCCCGGAGAGACGCTCCCGACCCAGACGGAGACAGAGACAGAA | |
| | | GCCCCAGAGGAAGAAGCCCAGCAAGAAGAAGTCCAGGAGGGCC | |
| | | TCCAGCTCCAGCAGCTCTGGGAGCAGCAACTCCAGCAAAAGCG | |
| | | ACAGCTGGGAGTCATGTTCCAGCAACTCCTCCGGCTCAGAACGG | |
| | | GGGCGGAAATACACCCGGCCCTCGCATAG | |
| ACR20267.1 | FJ392111.1 | ATGGCAGCCTGGTGGTGGGGCAGGCGGAGACGCTGGCGCAGG | 216 |
| | | TGGAGGCGCCGCCGCCTCCCTCGCCGCCGCCGCTGGCGACGG | |
| | | AGGAGACGGTGGCCCAGAAGACGCAGGCGGAGATGGCCGCGC | |
| | | AGACGCAGACGTCGCAGACCTGCTCGCCGCCCTAGAAGGAGAC | |
| | | GCAGACGCCGAAGGGTAAGGAGACCTCGCCGGCGCCAAAAACT | |
| | | GGTACTGACTCAGTGGAACCCTCAGACAGTTAGAAAGTGCATTA | |
| | | TCAGAGGGTTCGTGCCGCTGTTCCAGTGCAGCAGAACTGCCTAC | |
| | | CACAGGAACTTTGTAGACCACATGGACGACGTGTACACCACGGG | |
| | | TCCCTTCGGGGGCGGCGCGGGGTCCATGCTTTTCACCCTGAGC | |
| | | TTCTTCTACCACGAGTTTAAAAAGCACCACTGCAAGTGGTCCGCC | |
| | | AGCAACAGAGACTTTGACTTGAGTAGATACAGGGGCGCGGTTCT | |
| | | AAAGTTCTATAGACATCCAGACGTAGACTACATAGTTTGGCTGAA | |
| | | CAGAAACCCCCCTTTCCAGGAAAACCTATTAGACGCCATGAGCA | |
| | | GACAGCCCCTCATAATGTTACAGACTCACAAGTGCATACTGGTG | |
| | | AGGAGCTTTAAAACGCACCCCAGGGGACCCTCGTACGTCAGAAT | |
| | | GAAAGTTAGACCCCCGAGACTACTTACAGACAAGTGGTACTTTC | |
| | | AGTCAGACTTCTGCAACGTTCCGCTTTTCCAGCTACAGTTTGCTC | |
| | | TTGCGGAACTGCGGTTTCCGATCGGCTCACCACAAACGAACACC | |
| | | ACTTGTGTAAACTTCCTGGTGTTAGACAACAGGTACCACTCATTT | |
| | | TTAGATAACAAACCACAACAGTCAGAGAACTCACAAAGAAAAGAG | |
| | | AGGGGGCACGGTTATTCCTTTACGGGTAAAGAGGGAGAACAGG | |
| | | ATAGACTAACATTCTGGCAGAGTTTGTGGAATACAGGCAGATTCC | |
| | | TAAACACCACTCACATTAACACCCTACTGCCAAACATCTCTAAAT | |
| | | TACAAGACCATAAAGCTGAAGACACAGACGCAAATCCTGACTATA | |
| | | AAAGTTTAATTAACGGTAACAAAAAGGTATATAACGATAGTCAATA | |
| | | CATGCAAAACGTTTGGCAACAAGGCAAAATAAATACCCTTTGTAA | |
| | | CGCTATAGCACAGGAACAATACAGAAAAATACAAAAGTACTATAA | |
| | | CACCACATACGGGCAGTACCAAAGGCAACTATTTACAGGCAAGA | |
| | | AATACTGGGACTACAGAGTAGGCACGTTCAGTCCCACCTTCCTA | |
| | | AGTCCCAGCAGACTAAATCCAGAGATGCCAGGTGCCTACACAGA | |
| | | GATAGCCTATAACCCCTGGACAGACGAGGGCACGGGCAACGTT | |
| | | GTGTGCCTGCAGTACCTAACAAAAGAAACCTCAGACTACAAGCC | |
| | | ACACGCAGGTAGCAAATTCACCATAGAGGACGTACCCCTGTGGA | |
| | | TAGCCATGAACGGGTACGTGGACATATGTAAAAAAGAGGGCAAA | |
| | | GATCCAGGCATAAGACTAAACTGCCTTATGTGTATAAGGTGTCC | |
| | | GTACACCAGGCCCAAACTTTACAACCCCAGATACCCCGAAGAAC | |
| | | TGTTTGTAGTGTACTCTTACAACTTTAGCCACGGGCGCATGCCC | |
| | | GGGGGGGACAAATACATACCCATGGAGTTTAAGGACAGGTGGTA | |
| | | CCCGTCGCTCATGCACCAGGAAGAGGTCATAGAGGACATAGTCA | |
| | | GGAGCGGCCCCTTTGCCCTAAAAGACCAGACAGACATGGTTACT | |
| | | TGCATGATGAGGTACTCGGCCCTGTTTAACTGGGGCGGTAATAT | |
| | | TATCCGCGAACAGGCCGTGGAAGACCCCTGTAAAAAGAACACCT | |
| | | TTGCCCTTCCCGGAGCCAGTGGAGTCGCTCGCCTACTACAAGTC | |
| | | AGCAACCCGATCAGGCAGACCCCCAGCACCACCTGGCACTCGT | |
| | | GGGACTGGAGAAGGTCCCTCTTTACACAAACGGGTATTAAAAGA | |
| | | ATGCGCGAACAACAACCGTATGATGAAATTACTTATGCAGGGCC | |
| | | TAAGAGGCCAAAACTCACAGTTCCCGCAGGGCCCACCCTCGCT | |
| | | GCCGGAGACGCCTACAACTACTGGGAAAGAAAACCGCTCACCTC | |
| | | GCCCGGAGAGACGCTCCCGACCCAGACGGAGACAGAGACAGAA | |
| | | GCCCCAGAGGAAGAAGCCCAGCAAGAAGAAGTCCAGGAGGGCC | |
| | | TCCAGCTCCAGCAGCTATGGGAGCAGCAACTCCAGCAAAAGCG | |
| | | ACAGCTGGGAGTCATGTTCCAGCAACTCCTCCGACTCAGAACGG | |
| | | GGGCGGAAATACACCCGGCCCTCGCATAG | |
| ACR20269.1 | FJ392112.1 | ATGGCAGCCTGGTGGTGGGGCAGGCGGAGACGCTGGCGCAGG | 217 |
| | | TGGAGGCGCCGCCGCCTCCCTCGCCGCCGCCGCTGGCGACGG | |
| | | AGGAGACGGTGGCCCAGAAGACGCAGGCGGAGATGGCCGCGC | |
| | | AGACGCAGACGTCGCAGACCTGCTCGCCGCCCTAGAAGGAGAC | |
| | | GCAGACGCCGAAGGGTAAGGAGACCTCGCCGGCGCCAAAAACT | |
| | | GGTACTGACTCAGTGGAACCCTCAGACAGTTAGAAAGTGCATTA | |
| | | TCAGAGGGTTCGTGCCGCTGTTCCAGTGCAGCAGAACTGCCTAC | |
| | | CACAGGAACTTTGTAGACCACATGGACGACGTGTACACCACGGG | |
| | | TCCCTTCGGGGGCGGCACGGGGTCCATGCTTTTCACCCTGAGC | |
| | | TTCTTCTACCACGAGTTTAAAAAGCACCACTGCAAGTGGTCCGCC | |
| | | AGCAACAGAGACTTTGACTTGTGTAGATACAGGGGCACGGTTCT | |
| | | AAAGTTTTATAGACATCCAGACGTAGACTACATAGTTTGGCTGAA | |
| | | CAGAAACCCCCCTTTCCAGGAAAACCTATTAGACGCCATGAGCA | |
| | | GACAGCCCCTCATAATGTTACAGACTCACAAGTGCATACTGGTG | |
| | | AGGAGCTTTAAAACGCACCCCAGGGGACCCTCGTACGTCAGAAT | |
| | | GAAAGTTAGACCCCCGAGACTACTTACAGACAAGTGGTACTTTC | |
| | | AGTCAGACTTCTGCAACGTTCCGCTTTTCCAGCTACAGTTTGCTC | |
| | | TTGCGGAACTGCGGTTTCCGATCGGCTCACCACAAACGAACACC | |
| | | ACTTGTGTAAACTTCCTGGTGTTAGATAACAGGTACCACTTATTTT | |
| | | TAGATAACAAACCACGACAGTCAGAGAACTTACAAAGAAAAGAG | |
| | | AGGGGGCACGGTTATGTCTTTACGGGTAATGAGGGAGAAGATGA | |
| | | TAGACTAAAATTCTGGCACAGTTTGTGGAGTACAGGCAGATTCCT | |
| | | AAACACCACTCACATTAACACCCTACTGCCAAACATCTCTAAATT | |
| | | ACAAGACCATGAAGCTGAAGACACACAGGCAAAAACTGACTATA | |
| | | AAAGTTTAATTAACGGTAACAAAAAGGTATATAACGATAGTCAATA | |
| | | CATGCAAGACGTTTGGGAACAAAAGAAAATACAAACCCTTTATAA | |
| | | GGTTATAGCAGAAGAACAATACAGAAAAATAGAAAAGTACTATAA | |
| | | CACCACATACGGGCAGTACCAAAGGCAACTATTTACAGGCAAGA | |
| | | AGTACTGGGACTACAGAGTAGGCATGTTCAGTCCCACCTTCCTA | |
| | | AGTCCCAGCAGACTAAATCCAGAGATGCCAGGTGCCTACACAGA | |
| | | GATAGCCTATAACCCCTGGACAGACGAGGGCACGGGCAACGTT | |
| | | GTGTGCCTGCAGTACCTAACAAAAGAAACCTCAGACTACAAGCC | |
| | | ACACGCAGGTAGCAAATTCACCATAGAGGACGTACCCCTGTGGA | |
| | | TAGCCATGAACGGGTACGTGGACATATGTAAAAAAGAGGGCAAA | |
| | | GATCCAGGCATAAGACTAAACTGCCTTATGTGTATAAGGTGTCC | |
| | | GTACACCAGGCCCAAACTTTACAACCCCAGATACCCCGAAGAAC | |
| | | TGTTTGTAGTGTACTCTTACAACTTTGCCCACGGGCGCATGCCC | |
| | | GGGGGGGACAAATACATACCCATGGAGTTTAAGGACAGGTGGTA | |
| | | CCCGTCGCTCATGCACCAGGAAGAGGTCATAGAGGACATAGTCA | |
| | | GGAGCGGCCCCTTTGCCCTAAAAGACCAGACAGAGATGGTTACT | |
| | | TGCATGATGAGGTACTCGGCCCTGTTTAACTGGGGCGGTAATAT | |
| | | TATCCGCGAACAGGCCGTGGAAGACCCCTGTAAAAAGAACACCT | |
| | | TTGCCCTTCCCGGAGCCAGTGGAGTCGCTCGCCTACTACAAGTC | |
| | | AGCAACCCGATCAGGCAGACCCCCAGCACCACCTGGCACTCGT | |
| | | GGGACTGGAGAAGGTCCCTCTTTACACAAACGGGTATTAAAAGA | |
| | | ATGCGCGAACAACAACCGTATGATGAAATTACTTATGCAGGGCC | |
| | | TAAGAGGCCAAAACTCACAGTTCCCGCAGGGCCCACCCTCGCT | |
| | | GCCGGAGACGCCTACAACTACTGGGAAAGAAAACCGCTCACCTC | |
| | | GCCCGGAGAGACGCTCCCGACCCAGACGGAGACAGAGACAGAA | |
| | | GCCCCAGAGGAAGAAGCCCAGCAAGAAGAAGTCCAGGAGGGCC | |
| | | TCCAGCTCCAGCAGCTCTGGGAGCAGCAACTCCAGCAAAAGCG | |
| | | ACAGCTGGGAGTCATGTTCCAGCAACTCCTCCGACTCAGAACGG | |
| | | GGGCGGAAATACACCCGGCCCTCGCATAG | |
| ACR20272.1 | FJ392114.1 | ATGGCTGCCTGGTGGTGGGGCAGGAGGCGGCGATGGCGCCGG | 218 |
| | | TGGAGACGGCGCCGTCTCCCTCGCCGCCGCCGCTGGCGACGG | |
| | | AGGAGACGGTGGCCCAGGAGGCGTAGGCGGAGATGGCCGCGG | |
| | | AGACGCAGACGTCGCGGACCTGCTCGCCGCCTTAGAAGGAGAC | |
| | | GTCGACGCAGAAGGGTAAGGAGACCTCGCCGGCGCCAAAAACT | |
| | | CGTACTGACTCAGTGGAACCCCCAGACCCAGAGAAAGTGCGTG | |
| | | GTCAGGGGGTTTCTGCCCCTGTTCTTTTGCGGACAGGGAGCCTA | |
| | | TCACAGAAACTTTGTGGAACACATGGACGACGTGTTCCCCAAGG | |
| | | GACCCTCGGGAGGGGGCTTTGGCAGCATGGTGTGGAACCTAGA | |
| | | TTTTTTGTACCAAGAGTTTAAAAAGCATCACAACAAGTGGTCTTC | |
| | | CAGCAACAGGGACTTTGACCTAGTGAGGTGCCACGGCACGGTG | |
| | | ATTAAATTCTACAGACACTCTGACTTTGACTACCTGGTGCACGTC | |
| | | ACCAGGACCCCTCCTTTCAAGGAGGACCTCCTCACCATCGTCAG | |
| | | CCACCAGCCGGGGCTCATGATGCAGAACTACAGGTGCATACTC | |
| | | GTAAAGAGTTACAAGACGCACCCCGGGGGGCGACCCTACATAA | |
| | | CACCTAAAATAAGGCCCCCCAGACTCCTGACGGACAAGTGGTAC | |
| | | TTTCGGCCCGACTTCTGCGGAGTTCCTCTTTTCAAACTGTACGTT | |
| | | ACTCTTGCAGAGTTGCGGTTTCCGATCTGCTCACCACAAACTGA | |
| | | CACCAATTGTGTCACCTTCCTGGTGTTAGACAACACCTACTACGA | |
| | | CTACTTAGACAATACTGCAGACACCACTAGAGACCATGAAAGAC | |
| | | AGCAGAAATGGACAAACATGAAAATGACACCCAGATACCATCTC | |
| | | ACCAGTCACATAAATACATTGTTTAGTGGAACACAACAGATGCAA | |
| | | AGCGCAAAAGAAACAGGCAAAGACAGTCAGTTTAGAGAAAACAT | |
| | | CTGGAAAACAGCTGAGGTTGTTAAAATTATTAAAGATATAGCCTC | |
| | | AAAAAACATGCAAAAACAACAAACCTACTACACAAAAACCTATGG | |
| | | CGCCTATGCCACCCAGTATTTTACTGGAAAACAATACTGGGACT | |
| | | GGAGGGTGGGCCTGTTCAGCCCCATATTCCTCAGTCCCAGCAGA | |
| | | CTGAACCCACAAGAGCCAGGGGCCTACACAGAAATAGCTTACAA | |
| | | TCCATGGACTGACGAGGGCACGGGCAACATAGTGTGCATTCAGT | |
| | | ACCTAACAAAGAAAGACAGTCACTACAAGCCGGGTGCCGGTAGC | |
| | | AAATTCGCAGTGACGGACGTTCCCCTGTGGGCCGCCCTGTTCG | |
| | | GGTACTACGACCAGTGTAAGAAAGAAAGCAAAGACGCGAACATA | |
| | | AGACTAAACCGCTTGCTGTTAGTCAGGTGCCCTTACACCAGGCC | |
| | | TAAACTGTACAATCCCAGAGACCCGGACCAACTGTTTGTAATGTA | |
| | | CAGCTACAACTTTGGGCACGGACGCATGCCGGGGGGCGACAAG | |
| | | TACGTGCCCATGGAATTTAAGGACAGGTGGTACCCGTGCATGCT | |
| | | GCACCAAGAAGAAGTAGTGGAGGAGATAGTAAGGTGCGGGCCC | |
| | | TTTGCTCCCAAAGACATGACTCCCTCGGTAACATGCATGGCCAG | |
| | | ATACTCATCCCTGTTCACCTGGGGGGGCAATATCATTCGCGAAC | |
| | | AGGCCGTGGAGGACCCCTGTAAAAAATCCACGTTTGCCATTCCC | |
| | | GGAGCCGGTGGACTCGCTCGCATTCTACAAGTCAGCAACCCGC | |
| | | AGAGGCAAGCCCCCACCACCACCTGGCACTCGTGGGGCTGGCG | |
| | | CCGATCCCTCTTTACAGAGACGGGTCTTAAGCGAATGCAGGAAC | |
| | | AACAACCTTACGATGAAATGTCCTATACAGGCCCTAAAAGGCCAA | |
| | | AACTGTCTGTTCCCCCAGCAGCAGAAGGAAACCTCGCTGCAGGA | |
| | | GGAGGCTTATTCTTCAGGGACGGAAAACAGCCTGCCTCGCCAG | |
| | | GAGGCAGTCTCCCGACGCAGTCGGAGACAGAAGCAGAAGCCGA | |
| | | AGACGAAGAAGCCCACCAAGAAGAGACGGAGGAGGGAGCGCA | |
| | | GCTCCAGCAGCTCTGGGAGCAGCAACTCCAACAGAAGCGAGAG | |
| | | CTGGGAATCGTTTTCCAACACCTCCTCCGACTCCGACAGGGGGC | |
| | | GGAAATCCACCCGGGCCTCGTATAA | |
| ACR20274.1 | FJ392115.1 | ATGGCTGCYTGGTGGTGGGGCAGGAGGCGGCGATGGCGCCGG | 219 |
| | | TGGAGACGGCGCCGTYTCCCTCGCCGCCGCCGCTGGCGACGG | |
| | | AGGAGACGGTGGCCCAGGAGGCGTAGGCGGAGATGGCCGCGG | |
| | | AGACGCAGACGTCGCAGACCTGCTCGCCGCCTTAGAAGGAGAC | |
| | | GTCGACGCAGAAGGGTAAGGAGACCTCGCCGGCGCCAAAAACT | |
| | | CGTACTGACTCAGTGGAACCCCCAGACCCAGAGAAAGTGCGTG | |
| | | GTCAGGGGGTTTCTGCCCCTGTTCTTCTGCGGACAGGGAGCCTA | |
| | | TCACAGAAACTTTGTGGAACACATGGACGACGTGTTCCCCAAGG | |
| | | GACCCTCGGGAGGGGGCTTTGGCAGCATGGTGTGGAACCTAGA | |
| | | TTTTTTGTACCAAGAGTTTAAAAAGCATCACAACAGGTGGTCTTC | |
| | | CAGCAACAGGGACTTTGACCTAGTGAGGTACCACGGCACGGTG | |
| | | ATTAAATTCTACAGACACTCTGACTTTGACTACCTGGTGCACGTC | |
| | | ACCAGGACCCCTCCTTTCAAGGAGGACCTCCTCACCATCGTCAG | |
| | | CCACCAGCCGGGGCTCATGATGCAGAACTACAGGTGCATACTC | |
| | | GTAAAGAGTTACAAGACGCACCCCGGGGGGCGACCCTACATAA | |
| | | CACTTAAAATAAGGCCCCCCAGACTCCTGACGGACAAGTGGTAC | |
| | | TTTCAGCCCGACTTCTGCGGAGTTCCTCTTTTCAAACTGTACGTT | |
| | | ACTCTTGCAGAGTTGCGGTTTCCGATCTGCTCACCACAAACTGA | |
| | | CACCAATTGTGTCACCTTCCTGGTGTTAGACAACACCTACTACGA | |
| | | CTACTTAGACAGTACTGCAGACACCACTAGAGACAATGAAAGAC | |
| | | ACCAGAAATGGAAAAACATGATAATGACACCCAGATACCATCTCA | |
| | | CCAGTCACATAAATACATTGTTTAGTGGAACACAACAGATGCAAA | |
| | | ACGCAAAAGAAACAGGCAAAGACAGTCAGTTTAGAGAAAACATC | |
| | | TGGAAAACAGAAGAGGTTGTTAAAATTATTCACGATATAGCCTCT | |
| | | AGAAACATGCAAAAACAAATAACCTACTACACAAAAACCTATGGC | |
| | | GCCTATGCCACCCAGTATTTTACTGGAAAACAATACTGGGACTG | |
| | | GAGGGTGGGCCTGTTCAGCCCCATATTCCTCAGTCCCAGCAGAC | |
| | | TGAACCCACAAGAGCCAGGGGCCTACACAGAAATAGCTTACAAT | |
| | | CCATGGACTGACGAGGGCACGGGCAACATAGTGTGCATTCAGTA | |
| | | CCTAACAAAGAAAGACAGTCACTACAAGCCGGGTGCCGGTAGCA | |
| | | AATTCGCAGTGACGGACGTTCCCCTGTGGGCCGCCCTGTTCGG | |
| | | GTACTACGACCAGTGTAAGAAAGAAAGCAAAGACGCGAACATAA | |
| | | GACTAAACTGCTTGCTGTTAGTCAGGTGCCCTTACACCAGGCCT | |
| | | AAACTGTACAATCCCAGAGACCCGGACCAACTGTTTGTAATGTAC | |
| | | AGCTACAACTTTGGGCACGGACGCATGCCGGGGGGCGACAAGT | |
| | | ACGTGCCCATGGAATTTAAGGACAGGTGGTACCCGTGCATGCTG | |
| | | CACCAAGAAGAAGTAGTGGAGGAGATAGTAAGGTGCGGGCCCT | |
| | | TTGCTCCCAAAGACATGACTCCCTCGGTAACATGCATGGCCAGA | |
| | | TACTCATCCCTGTTCACCTGGGGGGGCAATATCATTCGCGAACA | |
| | | GGCCGTGGAGGACCCCTGTAAAAAATCCACGTTTGCCATTCCCG | |
| | | GAGCCGGTGGACTCGCTCGCATTCTACAAGTCAGCAACCCGCA | |
| | | GAGGCAAGCCCCCACGACCACGTGGCACTTGTGGGACTGGCGC | |
| | | CGATCCCTCTTTACAGAGACGGGTCTTAAGCGAATGCAGGAACA | |
| | | ACAACCTTACGATGAAATGTCTTATACAGGCCCTAAAAGGCCAAA | |
| | | ACTGTCCGTTCCCCCAGCAGCAGAAGGAAACCTCGCTGCAGGA | |
| | | GGAGGCTTATTCTTCCGGGACAGAAAACAGCCCACCTCGCCAG | |
| | | GAGGCAGTCTCCCGACGCAGTCGGAGACAGAAGCAGAAGCGGA | |
| | | AGACGAAGAAGCCCACCAAGAAGAGACGGAGGAGGGAGCGCA | |
| | | GCTCCAGCAGCTCTGGGAGCAGCAACTCCAACAGAAGCGAGAG | |
| | | CTGGGAATCGTTTTCCAACACCTCCTCCGACTCCGACAGGGGGC | |
| | | GGAAATCCACCCGGGCCTCGTATAA | |
| ACR20277.1 | FJ392117.1 | ATGGCATGGTGGTGGTGGAGAAGGAGACGCCGCCCGTGGAGAA | 220 |
| | | GGCGCTGGCGCTGGAAGAGACGAGCCCGAGTACGAACCAGGA | |
| | | GACCTAGACGCGCTGTTCGCCGCCGTCGAAGAAGAGTAAGGAG | |
| | | GCGGAGGAGGGGGTGGAGGAGACTATACAGACGATGGCGACG | |
| | | AAAGGGCAGACGCAGACGCAGACGCAAAAAGTTAGTAATGAAAC | |
| | | AGTGGAACCCCTCCACTGTCAGCAGATGCTATATTGTTGGATAC | |
| | | CTGCCTATTATTATTATGGGACAGGGGACTGCATCCATGAACTAT | |
| | | GCATCTCACTCAGACGACGTGTACTACCCCGGACCGTTTGGGGG | |
| | | GGGAATAAGCTCTATGAGGTTTACTTTAAGAATACTGTATGACCA | |
| | | GTTTATGAGAGGACAGAACTTCTGGACTAAGACAAACGAGGACT | |
| | | TGGACCTAGCTAGATTTCTAGGCAGCAAATGGAGGTTCTATAGA | |
| | | CACAAAGATGTGGACTTTATAGTGACTTACGAGACCTCAGCCCC | |
| | | CTTTACAGACTCCCTAGAGTCAGGACCACACCAACACCCAGGCA | |
| | | TACAGATGCTAATGAAAAACAAAATACTAATCCCTAGCTTTGCCA | |
| | | CCAAACCAAAAGGAAGGTCTAGCATTAAAGTTAGAATACAGCCC | |
| | | CCAAAGCTAATGATAGACAAGTGGTACCCACAAACTGACTTCTGT | |
| | | GAAGTAACGCTGCTAACCATACATGCAACCGCCTGCAACTTGCG | |
| | | GTTTCCGTTCTGCTCACCACAAACTGACACTTCCTGTGTTCAGTT | |
| | | TCAAGTGTTGTCATACAACGCTTACAGGCAGAGAATTTCAATACT | |
| | | TCCTGAATTATGTACTAGAGAAAAGCTTAGGGAGTTTATTAAACA | |
| | | AGTAGTAAAACCAAATTTAACATGCATAAACACTCTAGCTACTCC | |
| | | ATGGTGCTTTAAATTCCCAGAGCTAGACAAACTACCACCAGTGG | |
| | | CAAACAATGCAACAGGCTGGTCAGTTAACCCAGATAGCGGAGAC | |
| | | GGAGATGTAATATACCAGGAAACTACATTAGAAACCAAATGGATT | |
| | | GCTAACAATGATGTGTGGCATACAAAAGACCAAAGAGCACACAA | |
| | | CAACATACATAGCCAATATGGCATGCCACAATCAGACGCATTAGA | |
| | | ACACAAAACAGGTTACTTCAGTCCAGCATTATTAAGCCCACAAAG | |
| | | ACTAAACCCACAGATACCAGGCCTATACATAAACATAGTCTACAA | |
| | | TCCACTAACAGACAAAGGAGAAGGCAACAAAATTTGGTGTGACC | |
| | | CACTAACAAAAAACACATTTGGCTATGATCCCCCTAAAAGTAAAT | |
| | | TCCTTATAGAAAATCTGCCACTGTGGTCTGCAGTAACAGGATACG | |
| | | TAGACTACTGCACGAAAGCCAGCAAAGATGAAAGCTTTAAATACA | |
| | | ACTACAGAGTACTTATCCAGACCCCATACACAGTACCAGCACTAT | |
| | | ACAGTGACTCTGAAACCACCAAAAACAGAGGCTACATTCCCATA | |
| | | GGCACAGACTTTGCATACGGCCGCATGCCTGGGGGAGTACAAC | |
| | | AAATACCAATTAGATGGAGAATGAGGTGGTACCCCATGCTATTTA | |
| | | ATCAACAACCAGTACTAGAAGACCTATTCCAGTCAGGCCCCTTTG | |
| | | CATACCAAGGAGATGCTAAATCAGCCACACTAGTCGGCAAATAT | |
| | | GCCTTTAAATGGCTATGGGGTGGCAATCGTATCTTCCAACAGGT | |
| | | GGTCAGAGACCCGCGCTCACACCAGCAAGACCAATCAGTTGGT | |
| | | CCCAGTAGACAGCCTAGAGCAGTACAAGTCTTTGACCCGAAGTA | |
| | | CCAAGCACCACAATGGACATTCCACGCGTGGGACATCAGACGTG | |
| | | GTCTGTTTGGCAGACAGGCTATTAAAAGAGTGTCAGCAAAACCA | |
| | | ACACCTGATGAGCTTATATCAACAGGCCCAAAAAGACCTCGGCT | |
| | | GGAAGTCCCCGCGTTCCAAGAAGAGCAAGAAAAAGACTTACTTT | |
| | | TCAGACAGAGAAAACACAAAGCCTGGGAGGACACAACGGAGGA | |
| | | AGAGACAGAAGCCCCCTCAGAAGAGGAGGAAGAGAACCAAGAG | |
| | | CTCCAGCTCGTCAGACGCCTCCAGCAGCAACGAGAGCTGGGAC | |
| | | GAGGCCTCAGATGCCTCTTCCAGCAACTAACCCGCACACAGATG | |
| | | GGGCTGCATGTAGACCCCCAACTATTGGCCCCTGTATAA | |
| ADO51761.1 | GU797360.1 | ATGGCATGGGGATGGTGGAAACGAAGGCGCAAGTGGTGGTGGA | 221 |
| | | GACGACGCTGGACTCGTGGCCGACTTCGCAAACGACGGGCTAG | |
| | | ACGAGCTGGTCGCCGCCCTCGACGAAGAAGAGTAAGGAGACGG | |
| | | AGGGCTTGGAGGCGTGGGCGACGAAAGAGACGGACTTTCAGAC | |
| | | GCAGACGCAGACGAAAGGGTAGGAGACACAGAACCAGACTTAT | |
| | | AATAAGACAATGGCAGCCAGAAATAGTGAGAAAGTGCCTCATAA | |
| | | TAGGCTACTTTCCCATGATTATATGTGGCCAGGGACGCTGGTCA | |
| | | GAGAACTACAGCAGCCACCTAGAGGACCGTGTAGTAAAACAGGC | |
| | | CTTCGGTGGGGGACACGCGACTACCAGGTGGTCTCTAAAAGTAC | |
| | | TGTACGAGGAGAACCTCAGACACTTGAACTTTTGGACCTGGACT | |
| | | AACAGAGACTTAGAACTGGCCAGGTACCTCAAAGTGACGTGGAC | |
| | | CTTTTACAGACACCAAGATGTAGACTTTATAATATACTTTAACAGA | |
| | | AAGAGCCCCATGGGAGGCAACATATACACAGCACCCATGATGCA | |
| | | TCCGGGAGCCCTAATGCTCAGCAAACACAAGATACTAGTAAAAA | |
| | | GCTTTAAAACAAAACCCAAGGGCAAAGCAACAGTTAAAGTGACTA | |
| | | TTAAGCCCCCCACTCTACTAGTAGACAAGTGGTACTTTCAAAAGG | |
| | | ACATTTGCGACATGACACTGTTAAACCTCAATGCCGTTGCGGCT | |
| | | GACTTGCGGTTTCCGTTCTGCTCACCACAAACTGACAACCCTTG | |
| | | CATCAACTTCCAGGTTCTGTCCTCAGTGTATAACAACTTCCTCTC | |
| | | TATAACTGACAATAGACTAACACCAGTCACAGATGATGGCCAGG | |
| | | CTTATTATAAAGCTTTTCTAGACGCTGCATTTACCAAAGACAGAG | |
| | | ACTTTAATGCTGTTAATACGTTTAGAACAATATCTAACTTTTCCCA | |
| | | CCCACAACTAGAACTTCCAACTAAAACCACCAACACATCCCAAGA | |
| | | TCAATACTTTAACACTCTAGATGGGTACTGGGGAGACCCCATATA | |
| | | TGTACACACACAAAATATAAAACCTGACCAAAACCTTGATAAATG | |
| | | CAAAGAAATACTTACAAACAACATGAAAAACTGGCATAAAAAAGT | |
| | | AAAGTCAGAAAACCCAAGTAGCCTGAACCACAGCTGCTTTGCCC | |
| | | ACAATGTAGGCATATTCAGCAGCTCATTCCTATCCGCAGGCAGA | |
| | | CTAGCACCAGAAGTTCCAGGCCTGTACACAGATGTTATTTACAAC | |
| | | CCATACACAGACAAGGGAAAGGGAAACATGCTATGGGTGGATTA | |
| | | CTGTAGCAAAGGAGACAACCTATACAAAGAAGGCCAAAGCAAGT | |
| | | GTCTACTTGCCAACCTACCCCTCTGGATGGCCACAAACGGTTAT | |
| | | ATAGACTGGGTAAAAAAAGAAACAGATAACTGGGTTATAAACACT | |
| | | CAAGCCAGAGTACTCATGGTATGTCCCTACACTTACCCAAAACTA | |
| | | TACCATGAAATACAGCCATTATATGGCTTTGTAGTATACTCATATA | |
| | | ACTTTGGAGAGGGAAAAATGCCAAACGGGGCCACATACATACCC | |
| | | TTTAAGTTTAGAAACAAGTGGTATCCAACCATATACATGCAGCAA | |
| | | GCAGTACTAGAAGATATATCCAGATCGGGCCCCTTTGCACTTAAA | |
| | | CAACAGATACCCAGCGCCACACTTACTGCCAAATACAAATTCAAA | |
| | | TTCTTATTTGGCGGTAACCCTACTTCTGAACAGGTTGTTAGAGAC | |
| | | CCCTGCACTCAGCCCACCTTCGAACTGCCCGGAGCCAGTACGC | |
| | | AGCCTCCACGAATACAAGTCACGGACCCGAAACTCCTCGGTCCC | |
| | | CACTACTCATTCCACTCGTGGGACCTCAGACGTGGCTACTATAG | |
| | | CACAAAGAGTATTAAACGAATGTCAGAACACGAAGAACCTTCTGA | |
| | | GTTTATTTTCCCAGGTCCCAAAAAACCCAGGGTCGACCTCGGGC | |
| | | CAATCCAACAGCAAGAAAGGCCCTCCGATTCACTCCAAAGAGAA | |
| | | TCGAGGCCGTGGGAGACCAGCGAAGAAGAGAGCGAAGCAGAAG | |
| | | TCCAGCAAGAAGAGACGGAGGAGGTGCCCCTCAGACAGCAACT | |
| | | CCTCCACAACCTCAGAGAGCAGCAGCAACTCCGAAAGGGCCTC | |
| | | CAGTGCGTCTTCCAGCAGCTAATAAAGACGCAGCAGGGGGTTCA | |
| | | CATAGACCCATCCCTACTGTAG | |
| AAX94182.1 | D0003341 .1 | ATGGCGTGGTCGTGGTGGTGGAGGCGACGGAAACGCTGGTGGC | 222 |
| | | CGCGCAGAAGGAGGCGATGGAGGAGATTTCGCACCCGAAGAGC | |
| | | TAGACGAGCTGTTCCGCGCCGTCGCCGCCGACGAAGAGTAAGG | |
| | | AGGCGCCGGTGGGGGAGGCGAGGACGTAGGAGACGGGTTTTTT | |
| | | ATAAGAGACGCAGACGAAAGACTGGCAGACTGTACAGAAAGCCC | |
| | | AAAAAGAAACTAGTACTGACTCAGTGGCACCCCACTACCGTCCG | |
| | | CAACTGCTCCATCCGAGGCCTTGTGCCTCTAGTACTCTGCGGAC | |
| | | ACACTCAGGGCGGCAGAAACTTTGCTCTCAGGAGCGATGACTAC | |
| | | CCCAAGCAGGGGTCTCCTTACGGAGGCAGTTTTAGCACTACAAC | |
| | | CTGGAACTTGAGGGTCCTTTTTGACGAACACCAAAAACACCACA | |
| | | ACACGTGGAGCTACCCCAATAACCAGCTAGACCTGGGCAGATAC | |
| | | AAGGGCTGCACCTTCTGCTTTTACAGAGGCAAAAAGACGGACTA | |
| | | CATAGTAAAGTTTCAGAGGAGGGGACCCTTTAAAATAAACAAGTA | |
| | | CAGCAGTCCCATGGCCCATCCGGGCATGATGATGCTAGATAAGA | |
| | | TGAAAATCCTGGTGCCCAGCTTTGATACCAGGCCCGGGGGTCG | |
| | | CTGA | |
| AAX94185.1 | DQ003342.1 | ATGGCGTGGTCGTGGTGGTGGAGGCGACGGAAACGCTGGTGGC | 223 |
| | | CGCGCAGAAGGAGGCGATGGAGGAGATTTCGCACCCGAAGAGC | |
| | | TAGACGAGCTGTTCCGCGCCGTCGCCGCCGACGAAGAGTAAGG | |
| | | AGGCGCCGGTGGGGGAGGCGAGGACGTAGGAGACGGGTTTTTT | |
| | | ATAAGAGACGCAGACGAAAGACTGGCAGACTGTACAGAAAGCCC | |
| | | AAAAAGAAACTAGTACTGACTCAGTGGCACCCCACTACCGTCCG | |
| | | CAACTGCTCCATCCGAGGCCTTGTGCCTCTAGTACTCTGCGGAC | |
| | | ACACTCAGGGCGGCAGAAACTTTGCTCTCAGGAGCGATGACTAC | |
| | | CCCAAGCAGGGGTCTCCTTACGGAGGCAGTTTTAGCACTACAAC | |
| | | CTGGAACTTGAGGGTCCTTTTTGACGAACACCAAAAACACCACA | |
| | | ACACGTGGAGCTACCCCAATAACCAGCTAGACCTGGGCAGATAC | |
| | | AAGGGCTGCACCTTCTGCTTTTACAGAGGCAAAAAGACGGACTA | |
| | | CATAGTAAAGTTTCAGAGGAGGGGACCCTTTAAAATAAACAAGTA | |
| | | CAGCAGTCCCATGGCCCATCCGGGCATGATGATGCTAGATAAGA | |
| | | TGAAAATCCTGGTGCCCAGCTTTGATACCAGGCCCGGGGGTCG | |
| | | CTGA | |
| AAX94188.1 | DQ003343.1 | ATGGCGTGGTCGTGGTGGTGGAGGCGACGGAAACGCTGGTGGC | 224 |
| | | CGCGCAGAAGGAGGCGATGGAGGAGATTTCGCACCCGAAGAGC | |
| | | TAGACGAGCTGTTCCGCGCCGTCGCCGCCGACGAAGAGTAAGG | |
| | | AGGCGCCGGTGGGGGAGGCGAAGACGTAGGAGACGGGTTTTTT | |
| | | ATAAGAGACGCAGACGAAAGACTGGCAGACTGTACAGAAAGCCC | |
| | | AAAAAGAAACTAGTACTGACTCAGTGGCACCCCACTACCGTCCG | |
| | | CAACTGCTCCATCCGAGGCCTTGTGCCTCTAGTACTCTGCGGAC | |
| | | ACACTCAGGGCGGCAGAAACTTTGCTCTCAGGAGCGATGACTAC | |
| | | CCCAAGCAGGGGTCTCCTTACGGAGGCAGTTTTAGCACTACAAC | |
| | | CTGGAACTTGAGGGTCCTTTTTGACGAACACCAAAAACACCACA | |
| | | ACACGTGGAGCTACCCCAATAACCAGCTAGACCTGGGCAGATAC | |
| | | AAGGGCTGCACCTTCTACTTTTACAGAGACAAAAAGACAGACTAC | |
| | | ATAGTAAAGTTTCAGAGGAGGGGACCCTTTAAAATAAACAAGTAC | |
| | | AGCAGTCCCATGGCCCATCCGGGCATGATGATGCTAGATAAGAT | |
| | | GAAAATCCTGGTGCCCAGCTTTGATACCAGGCCCGGGGGTCGC | |
| | | TGA | |
| AAX94191.1 | DQ003344.1 | ATGGCGTGGTCGTGGTGGTGGAGGCGACGGAAACGCTGGTGGC | 225 |
| | | CGCGCAGAAGGAGGCGATGGAGGAGATTTCGCACCCGAAGAGC | |
| | | TAGACGAGCTGTTCCGCGCCGTCGCCGCCGACGAAGAGTAAGG | |
| | | AGGCGCCGGTGGGGGAGGCGAAGACGTAGGAGACGGGTTTTTT | |
| | | ATAAGAGACGCAGACGAAAGACTGGCAGACTGTACAGAAAGCCC | |
| | | AAAAAGAAACTAGTACTGACTCAGTGGCACCCCACTACCGTCCG | |
| | | CAACTGCTCCATCCGAGGCCTTGTGCCTCTAGTACTCTGCGGAC | |
| | | ACACTCAGGGCGGCAGAAACTTTGCTCTCAGGAGCGATGACTAC | |
| | | CCCAAGCAGGGGTCTCCTTACGGAGGCAGTTTTAGCACTACAAC | |
| | | CTGGAACTTGAGGGTCCTTTTTGACGAACACCAAAAACACCACA | |
| | | ACACGTGGAGCTACCCCAATAACCAGCTAGACCTGGGCAGATAC | |
| | | AAGGGCTGCACCTTCTACTTTTACAGAGACAAAAAGACAGACTAC | |
| | | ATAGTAAAGTTTCAGAGGAGGGGACCCTTTAAAATAAACAAGTAC | |
| | | AGCAGTCCCATGGCCCATCCGGGCATGATGATGCTAGATAAGAT | |
| | | GAAAATCCTGGTGCCCAGCTTTGATACCAGGCCCGGGGGTCGC | |
| | | TGA | |
| AAX94183.1 | DQ003341.1 | ATGTACTATGGCTGCATAGGAATTAATTCCACTTTAACAACCAAG | 226 |
| | | TATGAAAACTTATTTAATAAACTATATTCCAAATGCTGCTACTTTG | |
| | | AAACCTTTCAAACAATAGCCCAGCTAAATCCTGGCTTTAAAGCTG | |
| | | CTAAAAAGACTACTAATGGTTCTGGTTCTACAGCTGCAACACTAG | |
| | | GAGACGCAGTAACTGAACTTAAAAACCCAAATGGTACTTTTTACA | |
| | | CAGGCAACAATAGCACCTTTGGCTGCTGCACATATAAACCCACT | |
| | | AAACAAATAGGTAGTAATGCCAATAAGTGGTTCTGGCATCAGTTA | |
| | | ACAGCCACAGATTCAGACACACTAGGCCAATACGGCCGTGCCTC | |
| | | CATTCAGTATATGGAGTACCACACAGGCATTTACAGCTCAATTTT | |
| | | TCTTAGCCCACTAAGAAGCAATCTAGAACTCCCTACAGCATACCA | |
| | | AGATGTAACATATAATCCACTAACTGACAGAGGTATAGGTAACAG | |
| | | AATCTGGTACCAGTACAGTACCAAAGAAAACACTACATTTAATGA | |
| | | AACACAGTGCAAATGTGTACTATCAGACTTGCCACTGTGGAGCA | |
| | | TGTTTTATGGCTATGTAGATTTTATAGAGTCAGAACTAGGCATCT | |
| | | CAGCAGAGATACACAACTTTGGCATAGTATGTGTCCAGTGCCCC | |
| | | TACACGTTTCCCCCAATGTTTGACAAATCCAAACCAGATAAAGGC | |
| | | TACGTGTTCTATGACACCCTTTTTGGCAACGGAAAGATGCCAGAC | |
| | | GGGAGCGGACACGTACCCACCTACTGGCAGCAGAGGTGGTGGC | |
| | | CCAGATTCAGCTTCCAGAGACAAGTGATGCACGACATTATCCTC | |
| | | ACCGGGCCCTTCAGCTACAAAGATGACTCTGTAATGACTGGCAT | |
| | | AACCGCAGGCTACAAGTTTAAATTCTCATGGGGCGGTGATATGG | |
| | | TCTCCGAACAGGTCATTAAAAACCCAGAGAGAGGGGACGGACG | |
| | | AGACTCCACCTATCCCGATAGACAGCGCCGCGACTCACAAGTTG | |
| | | TTGACCCACGCTCCATGGGCCCCCAATGGGTGTTCCACACCTTT | |
| | | GACTACAGACGGGGGCTTTTTGGAAAGGACGCTATTAAGCGAGT | |
| | | GTCAGAAAAACCGACAGATCCTGACTACTTTACAACACCTTACAA | |
| | | AAAACCAAGATTTTTCCCTCCAACAGCAGGAGAAGAAAAACTGCA | |
| | | AGAAGAAGACTCCGCTTTACAGGAGAAAAGAAGCCCGCTCTCGT | |
| | | CAGAAGAGGGGCAGACGAGGGCGCAAGTCCTCCAGCAGCAGGT | |
| | | CCTCCAGTCGGAGCTCCAGCAGCAGCAGGAGCTCGGGGAGCAG | |
| | | CTCAGATTCCTCCTCAGGGAAATGTTCAAAACCCAAGCGGGCAT | |
| | | ACACATGAACCCCCGCGCATTTCAGGAGCTGTAA | |
| AAX94186.1 | DQ003342.1 | ATGTACTATGGCTGCATAGGAATTAATTCCACTTTAACAACCAAG | 227 |
| | | TATGAAAACTTATTTAATAAACTATATTCCAAATGCTGCTACTTTG | |
| | | AAACCTTTCAAACAATAGCCCAGCTAAATCCTGGCTTTAAAGCTG | |
| | | CTAAAAAGACTACTAATGGTTCTGGTTCTACAGCTGCAACACTAG | |
| | | GAGACGCAGTAACTGAACTTAAAAACCCAAATGGTACTTTTTACA | |
| | | CAGGCAACAATAGCACCTTTGGCTGCTGCACATATAAACCCACT | |
| | | AAACAAATAGGTAGTAATGCCAATAAGTGGTTCTGGCATCAGTTA | |
| | | ACAGCCACAGATTCAGACACACTAGGCCAATACGGCCGTGCCTC | |
| | | CATTCAGTATATGGAGTACCACACAGGCATTTACAGCTCAATTTT | |
| | | TCTTAGCCCACTAAGAAGCAATCTAGAACTCCCTACAGCATACCA | |
| | | AGATGTAACATATAATCCACTAACTGACAGAGGTATAGGTAACAG | |
| | | AATCTGGTACCAGTACAGTACCAAAGAAAACACTACATTTAATGA | |
| | | AACACAGTGCAAATGTGTACTATCAGACTTGCCACTGTGGAGCA | |
| | | TGTTTTATGGCTATGTAGATTTTATAGAGTCAGAACTAGGCATCT | |
| | | CAGCAGAGATACACAACTTTGGCATAGTATGTGTCCAGTGCCCC | |
| | | TACACGTTTCCCCCAATGTTTGACAAATCCAAACCAGATAAAGGC | |
| | | TACGTGTTCTATGACACCCTTTTTGGCAACGGAAAGATGCCAGAC | |
| | | GGGAGCGGACACGTACCCACCTACTGGCAGCAGAGGTGGTGGC | |
| | | CCAGATTCAGCTTCCAGAGACAAGTGATGCACGACATTATCCTC | |
| | | ACCGGGCCCTTCAGCTACAAAGATGACTCTGTAATGACTGGCAT | |
| | | AACCGCAGGCTACAAGTTTAAATTCTCATGGGGCGGTGATATGG | |
| | | TCTCCGAACAGGTCATTAAAAACCCAGAGAGAGGGGACGGACG | |
| | | AGACTCCACCTATCCCGATAGACAGCGCCGCGACTCACAAGTTG | |
| | | TTGACCCACGCTCCATGGGCCCCCAATGGGTGTTCCACACCTTT | |
| | | GACTACAGACGGGGGCTTTTTGGAAAGGACGCTATTAAGCGAGT | |
| | | GTCAGAAAAACCGACAGATCCTGACTACTTTACAACACCTTACAA | |
| | | AAAACCAAGATTTTTCCCTCCAACAGCAGGAGAAGAAAAACTGCA | |
| | | AGAAGAAGACTCCGCTTTACAGGAGAAAAGAAGCCCGCTCTCGT | |
| | | CAGAAGAGGGGCAGACGAGGGCGCAAGTCCTCCAGCAGCAGGT | |
| | | CCTCCAGTCGGAGCTCCAGCAGCAGCAGGAGCTCGGGGAGCAG | |
| | | CTCAGATTCCTCCTCAGGGAAATGTTCAAAACCCAAGCGGGCAT | |
| | | ACACATGAACCCCCGCGCATTTCAGGAGCTGTAA | |
| AAX94189.1 | DQ003343.1 | ATGTACTATGACTGCATAGGAATTAATTCCACTTTAACAACCAAG | 228 |
| | | TATGAAAACTTATTTAATAAACTATATTCCAAATGCTGCTACTTTG | |
| | | AAACCTTTCAAACAATAGCCCAGCTAAATCCTGGCTTTAAAGCTG | |
| | | CTAAAAAGACTACTAATGGTTCTGGTTCTACAGCTGCAACACTAG | |
| | | GAGACGCAGTAACTGAACTTAAAAACCCAAATGGTACTTTTTACA | |
| | | CAGGCAACAATAGCACCTTTGGCTGCTGCACATATAAACCCACT | |
| | | AAACAAATAGGTAGTAATGCCAATAAGTGGTTCTGGCATCAGTTA | |
| | | ACAGCCACAGATTCAGACACACTAGGCCAATACGGCCGTGCCTC | |
| | | CATTCAGTATATGGAGTACCACACAGGCATTTACAGCTCAATTTT | |
| | | TCTTAGCCCACTAAGAAGCAATCTAGAATTCCCTACAGCATACCA | |
| | | AGATGTAACATATAATCCACTAACTGACAGAGGTATAGGTAACAG | |
| | | AATCTGGTACCAGTACAGTACCAAAGAAAACACTACATTTAATGA | |
| | | AACACAGTGCAAATGTGTACTATCAGACTTGCCACTGTGGAGCA | |
| | | TGTTTTATGGCTATGTAGATTTTATAGAGTCAGAACTAGGCATCT | |
| | | CAGCAGAGATACACAACTTTGGCATAGTATGTGTCCAGTGCCCC | |
| | | TACACGTTTCCCCCAATGTTTGACAAATCCAAACCAGATAAAGGC | |
| | | TACGTGTTCTATGACACCCTTTTTGGCAACGGAAAGATGCCAGAC | |
| | | GGGAGCGGACACGTACCCACCTACTGGCAGCAGAGGTGGTGGC | |
| | | CCAGATTCAGCTTCCAGAGACAAGTGATGCACGACATTATCCTC | |
| | | ACCGGGCCCTTCAGCTACAAAGATGACTCTGTAATGACTGGCAT | |
| | | AACCGCAGGCTACAAGTTTAAATTCTCATGGGGCGGTGATATGG | |
| | | TCTCCGAACAGGTCATTAAAAACTCAGAGAGAGGGGACGGACGA | |
| | | GACTCCACCTATCCCGATAGACAGCGCCGCGACTTACAAGTTGT | |
| | | TGACCCACGCTCCATGGGCCCCCAATGGGTATTCCACACCTTTG | |
| | | ACTACAGACGGGGGCTTTTTGGAAAGGACGCTATTAAGCGAGTG | |
| | | TCAGAAAAACCGACAGATCCTGACTACTTTACAACACCTTACAAA | |
| | | AAACCAAGATTTTTCCCTCCAACAGCAGGAGAAGAAAAACTGCAA | |
| | | GAAGAAGACTCCGCTTTACAGGAGAAAAGAAGCCCGCTCTCGTC | |
| | | AGAAGAGGGGCAGACGAGGGCGCAAGTCCTCCAGCAGCAGGTC | |
| | | CTCCAGTCGGAGCTCCAGCAGCAGCAGGAGCTCGGGGAGCAGC | |
| | | TCAGATTCCTCCTCAGGGAAATGTTCAAAACCCAAGCGGGCATA | |
| | | CACATGAACCCCCGCGCATTTCAGGAGCTGTAA | |
| AAX94192.1 | DQ003344.1 | ATGTACTATGACTGCATAGGAATTAATTCCACTTTAACAACCAAG | 229 |
| | | TATGAAAACTTATTTAATAAACTATATTCCAAATGCTGCTACTTTG | |
| | | AAACCTTTCAAACAATAGCCCAGCTAAATCCTGGCTTTAAAGCTG | |
| | | CTAAAAAGACTACTAATGGTTCTGGTTCTACAGCTGCAACACTAG | |
| | | GAGACGCAGTAACTGAACTTAAAAACCCAAATGGTACTTTTTACA | |
| | | CAGGCAACAATAGCACCTTTGGCTGCTGCACATATAAACCCACT | |
| | | AAACAAATAGGTAGTAATGCCAATAAGTGGTTCTGGCATCAGTTA | |
| | | ACAGCCACAGATTCAGACACACTAGGCCAATACGGCCGTGCCTC | |
| | | CATTCAGTATATGGAGTACCACACAGGCATTTACAGCTCAATTTT | |
| | | TCTTAGCCCACTAAGAAGCAATCTAGAATTCCCTACAGCATACCA | |
| | | AGATGTAACATATAATCCACTAACTGACAGAGGTATAGGTAACAG | |
| | | AATCTGGTACCAGTACAGTACCAAAGAAAACACTACATTTAATGA | |
| | | AACACAGTGCAAATGTGTACTATCAGACTTGCCACTGTGGAGCA | |
| | | TGTTTTATGGCTATGTAGATTTTATAGAGTCAGAACTAGGCATCT | |
| | | CAGCAGAGATACACAACTTTGGCATAGTATGTGTCCAGTGCCCC | |
| | | TACACGTTTCCCCCAATGTTTGACAAATCCAAACCAGATAAAGGC | |
| | | TACGTGTTCTATGACACCCTTTTTGGCAACGGAAAGATGCCAGAC | |
| | | GGGAGCGGACACGTACCCACCTACTGGCAGCAGAGGTGGTGGC | |
| | | CCAGATTCAGCTTCCAGAGACAAGTGATGCACGACATTATCCTC | |
| | | ACCGGGCCCTTCAGCTACAAAGATGACTCTGTAATGACTGGCAT | |
| | | AACCGCAGGCTACAAGTTTAAATTCTCATGGGGCGGTGATATGG | |
| | | TCTCCGAACAGGTCATTAAAAACTCAGAGAGAGGGGACGGACGA | |
| | | GACTCCACCTATCCCGATAGACAGCGCCGCGACTTACAAGTTGT | |
| | | TGACCCACGCTCCATGGGCCCCCAATGGGTATTCCACACCTTTG | |
| | | ACTACAGACGGGGGCTTTTTGGAAAGGACGCTATTAAGCGAGTG | |
| | | TCAGAAAAACCGACAGATCCTGACTACTTTACAACACCTTACAAA | |
| | | AAACCAAGATTTTTCCCTCCAACAGCAGGAGAAGAAAAACTGCAA | |
| | | GAAGAAGACTCCGCTTTACAGGAGAAAAGAAGCCCGCTCTCGTC | |
| | | AGAAGAGGGGCAGACGAGGGCGCAAGTCCTCCAGCAGCAGGTC | |
| | | CTCCAGTCGGAGCTCCAGCAGCAGCAGGAGCTCGGGGAGCAGC | |
| | | TCAGATTCCTCCTCAGGGAAATGTTCAAAACCCAAGCGGGCATA | |
| | | CACATGAACCCCCGCGCATTTCAGGAGCTGTAA | |

[symbol]

indicates data missing or illegible when filed

[0408] In some embodiments, the genetic element comprises a nucleotide sequence encoding a capsid protein or a functional fragment of a capsid protein or a sequence having at least about 60%, 70% 80%, 85%, 90% 95%, 96%, 97%, 98%, 99%, or 100% sequence identity to any one of the amino acid sequences described herein, e.g., in any of Tables 2, 4, 6, 8, 10, 12, 14, or 16. In some embodiments, the substantially non-pathogenic protein comprises a capsid protein or a functional fragment of a capsid protein or a sequence having at least about 60%, 65%, 70%, 75%, 80%, 85%, 90% 95%, 96%, 9′7%, 98%, 99%, or 100% sequence identity to any one of the amino acid sequences described herein, e.g., in any of Tables 2, 4, 6, 8, 10, 12, 14, or 16.

TABLE 16
Examples of amino acid sequences of substantially
non-pathogenic proteins, e.g., capsid proteins

| Accession # | Accession # | | SEQ |
|---|---|---|---|
| (nucleotide | (protein | | ID |
| sequence) | sequence) | Protein Sequence | NO: |
| AF079173.1 | AAC28465.1 | MAYGWWRRRRRRWRRWRPRPWRPRWRTRRRRPAR | 230 |
| | | RRGHRRNVRRRRRGGRWRRRYRRWKRKGRRRKKAKI | |
| | | IIRQWQPNYRRRCNIVGYIPVLICGENTVSRNYATHSDD | |
| | | TNYPGPFGGGMTTDKFTLRILYDEYKRFMNYWTASNED | |
| | | LDLCRYLGVNLYFFRHPDVDFIIKINTMPPFLDTELTAPR | |
| | | LHPGMLALDKRARWIPSLKSIPGKKHYIKIRVGAPKMFT | |
| | | DKWYPQTDLCDMVLLTVYATAADIPYPFGSPLTDSVVV | |
| | | NFQVLQSMYDKYISILPDQKSQSKSLLSNIANYIPFYNTT | |
| | | QTIAQLKPFIDAGNITSGTAATTWGSYINTTKFTTTATTT | |
| | | YTYPGTTTNTVTMYSSNDSWYRGTVYNNQIKELPKKAA | |
| | | ELYSKATKTLLGNTFTTEDCTLEYHGGLYSSIWLSPGRS | |
| | | YFETPGAYTDIKYNPFTDRGEGNMLWIDWLSKKNMNYD | |
| | | KVQSKCLVSDLPLWASAYGYVEFCAKSTGDQNIHMNA | |
| | | RLLIRSPFTDPQLLVHTDPTKGFVPYSLNFGNGKMPGG | |
| | | SSNVPIRMRAKWYPTLFHQQEVLEALAQSGPFAYHSDI | |
| | | KEVSLGMKYRFKWIWGGNPVRQQVVRNPCKETHSSG | |
| | | NRVPRSLQIVDPKYNSPELTFHTWDFRRGLFGPKAIQR | |
| | | MQQQPTTTDIFSAGRKRPRRDTEVYHSSQEGEQKESLL | |
| | | FPPVKLLRRVPPWEDSQQEESGSQSSEEETQTVSQQL | |
| | | KQQLQQQQILGVKLRLLFDQVQKIQQNQDINPTLLPRG | |
| | | GDLASLFQIAP* | |
| AF129887.1 | AAD20024.1 | MAYGLWRRRRRRWKRWRRRRWRRRWRTRRRRPAG | 231 |
| | | RRRRRRTVRRRRRRGRWRRRYRRWRRKGRRRKKKK | |
| | | LIIRQWQPNYTRKCNIVGYMPVIMCGENTVSRNYATHS | |
| | | DDTNYPGPFGGGMTTDKFTLRILYDWYKRFMNYWTAS | |
| | | NEDLDLCRYLGVNLYFFRHPDVDFIIKINTMPPFLDTELT | |
| | | APSIHPGMLALDERARWIPSLKSRPGKKHYIKIRVGAPK | |
| | | MFTDKWYPQTDLCDMVLLTVYATAADMQYPFGYPLTD | |
| | | SVVVNFQVLQSMYDKYISILPDQKSQRESLLSNIANYIPF | |
| | | YNTTQTIAQLKPFIDAGNITSGTTATTWGSYINTTKFTTT | |
| | | ATTTYTYPGTTTNTVTMLTSNDSWYRGTVYNNQIKELP | |
| | | KKAAELYSKATKTLLGNTFTTEDCTLEYHGGLYSSIWLS | |
| | | PGRSYFETPGAYTDMKYNPFTDRGEGNMLWIDWLSKK | |
| | | NMNYDKVQSKCLVSDLPLWAAAYGYLEFCSKSTGDTNI | |
| | | HMNARLLIRSPFTDPQLIAHTDPTKGFVPYSLNFGNGKM | |
| | | PGGSSNVPIRMRAKWYPTLFHQQEVLEALAQSGPFAY | |
| | | HSDIKKVSLGIKYRFKWIWGGNPVRQQVVRNPCKEPHS | |
| | | SVNRVPRSIQIVDPKYNSPELTIHAWDFRRGFFGPKAIQ | |
| | | RMQQQPTATEFFSAGRKRPRRDTEVYQSDQEKEQKES | |
| | | SLFPPVKLLRRVPPWEDSEQEQSGSQSSEEETHTVSQ | |
| | | QLKQQLQQQRILGVKLRVLFHQVHKIQQNQHINPTLLPR | |
| | | GGALASLSQIAP* | |
| AF116842.1 | AAD29634.1 | MAYGLWHRRRRRWRRWKRTPWKRRWRTRRRRPARR | 232 |
| | | RGRRRNVRRRRRGGRWRRRYRRWKRKGRRRKKAKIII | |
| | | RQWQPNYRRRCNIVGYIPVLICGENTVSRNYATHSDDT | |
| | | NYPGPFGGGMTTDKFTLRILCDEYKRFMNYWTASNEDL | |
| | | DLCRYLGVNLYFFRHPDVDFIIKINTMPPFLDTELTAPSIH | |
| | | PGMLALDKRARWIPSLKSRPGKKHYIKIRVGAPKMFTDK | |
| | | WYPQTDLCDMVLLTVYATTADMQYPFGSPLTDSVVVNF | |
| | | QVLQSMYDKTISILPDEKSQREILLNKIASYIPFYNTTQTI | |
| | | AQLKPFIDAGNVTSGATATTWASYINTTKFTTATTTTYAY | |
| | | PGTNRPPVTMLTCNDSWYRGTVYNTQIQQLPIKAAKLY | |
| | | LEATKTLLGNNFTNEDYTLEYHGGLYSSIWLSPGRSYFE | |
| | | TTGAYTDIKYNPFTDRGEGNMLWIDWLSKKNMNYDKV | |
| | | QSKCLVRDLPLWAAAYGYVEFCAKSTGDKNIYMNARLL | |
| | | IRSPFTDPQLLVHTDPTKGFVPYSLNFGNGKMPGGSSN | |
| | | VPIRMRAKWYPTLFHQQEVLEALAQSGPFAYHSDIKKV | |
| | | SLGMKYRFKWIWGGNPVRQQVVRNPCKETHSSGNRV | |
| | | PRSLQIVDPKYNSPELTFHTWDFRRGLFGPRAIQRMQQ | |
| | | QPTTTDILSAGRKRPRKDTEVYHPSQEGEQKESLLFPP | |
| | | VKLLRRVPPWEDSQQEESGSQSSEEETQTVSQQLKQQ | |
| | | LQQQQILGVKLRLLFDQVQKIQQNQDINPTLLPRGGDLA | |
| | | SLFQIAP* | |
| AB026345.1 | BAA85662.1 | MAYGWWRRRRRRWRRWRRRPWRRRWRTRRRRPAR | 233 |
| | | RRGRRRNVRRRRRGGRWRRRYRRWKRKGRRRKKAKI | |
| | | IIRQWQPNYRRRCNIVGYIPVLICGENTVSRNYATHSDD | |
| | | TNYPGPFGGGMTTDKFTLRILYDEYKRFMNYWTASNED | |
| | | LDLCRYLGVNLYFFRHPDVDFIIKINTMPPFLDTELTAPSI | |
| | | HPGMLALDKRARWIPSLKSRPGKKHYIKIRVGAPKMFTD | |
| | | KWYPQTDLCDMVLLTVYATAADMQYPFGSPLTDSVVV | |
| | | NFQVLQSMYDEKISILPDQKSQRESLLTSIANYIPFYNTT | |
| | | QTIAQLKPFIDAGNVTSGTTATTANGSYINTTKFTTTATTT | |
| | | YTYPGTTTTTVTMLTSNDSWYRGTVYNNQIKDLPKKAA | |
| | | ELYSKATKTLLGNTFTTEDYTLEYHGGLYSSIWLSPGRS | |
| | | YFETPGAYTDIKYNPFTDRGEGNMLWIDWLSKKNMNYD | |
| | | KVQSKCLISDLPLWAAAYGYVEFCAKSTGDQNIHMNAR | |
| | | LLIRSPFTDPQLLVHTDPTKGFVPYSLNFGNGKMPGGS | |
| | | SNVPIRMRAKWYPTLFHQQEVLEALAQSGPFAYHSDIK | |
| | | KVSLGMKYRFKWIWGGNPVRQQVVRNPCKETHSSGN | |
| | | RVPRSLQIVDPKYNSPELTFHTWDFRRGLFGPKAIQRM | |
| | | QQQPTTTDIFSAGRKRPRRDTEVYHSSQEGEQKESLLF | |
| | | PPVKLLRRVPPWEDSQQEESGSQSSEEETQTVSQQPK | |
| | | QQLQQQRILGVKLRLLFNQVQKIQQNQDINPTLLPRGG | |
| | | DLASLFQVAP* | |
| AB026346.1 | BAA85664.1 | MAYGWWRRRRRRWRRWRRRPWRRRWRTRRRRPAR | 234 |
| | | RRGRRRNVRRRRRGGRWRRRYRRWKRKGRRRKKAKI | |
| | | IIRQWQPNYRRRCNIVGYIPVLICGENTVSRNYATHSDD | |
| | | TNYPGPFGGGMTTDKFTLRILYDEYKRFMNYWTASNED | |
| | | LDLCRYLGVNLYFFRHPDVDFIIKINTMPPFLDTELTAPSI | |
| | | HPDMLALDKRARWIPSLKSRPGKKHYIKIRVGAPKMFTD | |
| | | KWYPQTDLCDMVLLTVYATTADMQYPFGSPLTDSVVV | |
| | | NFQVLQSMYDENISILPTEKSKRDVLHSTIANYTPFYNTT | |
| | | QIIAQLRPFVDAGNLTSASTTERNGSYINTTKFNTTATTT | |
| | | YTYPGSTTTTVTMLTCNDSWYRGTVYNNQISKLPKQAA | |
| | | EFYSKATKTLLGNTFTTEDHTLEYHGGLYSSIWLSAGRS | |
| | | YFETPGAYTDIKYNPFTDRGEGNMLWIDWLSKNNMNY | |
| | | DKVQSKCLISDLPLWAAAYGYVEFCAKSTGDQNIHMNA | |
| | | RLLIRSPFTDPQLLVHTDPTKGFVPYSLNFGNGKMPGG | |
| | | SSNVPIRMRAKWYPTLFHQQEVLEALAQSGPFAYHSDI | |
| | | KKVSLGMKYRFKWIWGGNPVRQQVVRNPCKETHSSG | |
| | | NRVPRSLQIVDPKYNSPELTFHTWDFRRGLFGPKAIQR | |
| | | MQQQPTTTDIFSAGRKRPRRDTEVYHSSQEGEQKESLL | |
| | | FPPVKLLRRVPPWEDSQQEESGSQSSEEETQTVSQQL | |
| | | KQQLQQQRILGVKLRLLFNQVQKIHQNQDINPTLLPRGG | |
| | | DLASLFQIAP* | |
| AB026347.1 | BAA85666.1 | MAYGWWRRRRRRWRRWRRRPWRRRWRTRRRRPAR | 235 |
| | | RRGRRRNVRRRRRGGRWRRRYRRWKRKGRRRKKAKI | |
| | | IIRQWQPNYRRRCNIVGYIPVLICGENTVSRNYATHSDD | |
| | | TNYPGPFGGGMTTDKFTLRILYDEYKRFMNYWTASNED | |
| | | LDLCRYLGVNLYFFRHPDVDFIIKINTMPPFLDTELTAPSI | |
| | | HPGMLALDKRARWIPSLKSRPGKKHYIKIRVEAPKMFTD | |
| | | KWYPQTDLCDMVLLTVYATTADMQYPFGSPLTDSVVV | |
| | | NFQVLQSMYDQNISILPTEKSKRTQLHDNITRYTPFYNT | |
| | | TQTIAQLKPFVDAGNVTPVSPTTTWGSYINTTKFTTTAT | |
| | | TTYTYPGTTTTTVTMLTCNDSWYRGTVYNNQISQLPKK | |
| | | AAEFYSKATKTLLGDTFTTEDYTLEYHGGLYSSIWLSAG | |
| | | RSYFETPGVYTDIKYNPFTDRGEGNMLWIDWLSKKNMN | |
| | | YDKVQSKCLISDLPLWAAAYGYVEFCAKSTGDQNIHMN | |
| | | AKLLIRSPFTDPQLLVHTDPTKGFVPYSLNFGNGKMPG | |
| | | GSSNVPIRMRAKWYPTLFHQQEVLEALAQSGPFAYHS | |
| | | DIKKVSLGMKYRFKWIWGGNPVRQQVVRNPCKETHSS | |
| | | GNRVPRSLQIVDPKYNSPELTFHTANDFRRGLFGPKAIQ | |
| | | RMQQQPTTTDIFSAGRKRPRRDTEVYHSSQEGEQKES | |
| | | LLFLPVKLLRRVPPWEDSQQEESGSQSSEEETQTVSQ | |
| | | QLKQQLQQQRILGVKLRLLFNQVQKIQQNQDINPTLLPR | |
| | | GGDLASLFQIAP* | |
| AB030487.1 | BAA90406.1 | MAYGWWRRRRRRWKRWRRRPRWRRPWRTRRRRPA | 236 |
| | | RRRGRRRTVRRRERGRWRRRYRRWRKKGKRRIKKKLI | |
| | | IRQWQPNYTRKCDILGYMPVIMCGENTLIRNYATHAND | |
| | | CYWPGPFGGGMATQKFTLRILYDDYKRFMNYWTSSNE | |
| | | DLDLCRYRGVTLYFFRHPDVDFIILINTTPPFVDTEITGPS | |
| | | IHPGMMALNKRARFIPSLKTRPGRRHIVKIRVGAPKLYE | |
| | | DKWYPQSELCDMPLLTVYATAADMQYPFGSPLTDTPV | |
| | | VTFQVLRSMYNDALSILPSNFEQDDNAGQKLYNEISSYL | |
| | | PYYNTTETIAQLKRYVENTEKISTTPNPWQSNYVNTITFT | |
| | | TAQSITTTTPYTTFSDSWYRGTVYKNAITKVPLAAAKLYE | |
| | | TQTKNLLSPTFTGGSEYLEYHGGLYSSIWLSAGRSYFE | |
| | | TKGAYTDICYNPYTDRGEGNMLWIDWLSKGDSRYDKA | |
| | | RSKCLIEKLPMWAAVYGYAEYCAKATGDSNIDMNARVV | |
| | | MRCPYTVPQMIDTSDPLRGFIPYSFNFGKGKMPGGTNQ | |
| | | VPIRMRAKWYPCLFHQKEVLEAIGQSGPFAYHSDQKKA | |
| | | VLGLKYRFHWIWGGNPVFPQVVRNPCKDTQGSTGPRK | |
| | | PRSVQIIDPKYNTPELTIHAWDFRRGFFGPKAIKRMQQQ | |
| | | PTDAELLPPGRKRSRRDTEVLQSSQERQKESLLLQQLH | |
| | | LQGRVPPWESLQGLQTETESQKEHEGTLSQQIREQVQ | |
| | | QQKLLGRQLREMFLQLHKILQNQHVNPTLLPRDQGLIW | |
| | | WFQIQ* | |
| AB030488.1 | BAA90409.1 | MAYGWWRRRRRRWKRWRRRPRWRRPWRTRRRRPA | 237 |
| | | GRRGRRRTVRRRRRGRWRRRYRRWRKKGRRRRKKK | |
| | | LIIRQWQPNYTRKCNIVGYMPVIMCGENTLIRNYATHAY | |
| | | NCSWPGPFGGGMATQKFTLRILYDDYKRFMNYWTSSN | |
| | | EDLDLCRYRGATLYFFRDPDVDFIILINTTPPFVDTEITGP | |
| | | SIHPGMLALNKRARFIPSLKTRPSRRHIVKIRVGAPKLYE | |
| | | DKWYPQSELCDMPLLTVYATATDMQYPFGSPLTDTPIV | |
| | | TFQVLRSMYNDALSILPSNFEGDDSAGAKLYKQISEYIP | |
| | | YYNTTETIAQLKGYVENTEKTQTTPNPWQSKYVNTKPF | |
| | | DTAQTITNQKPYTPFADTWYRGTAYKEEIKNVPLKAAEL | |
| | | YELHTTHLLSTTFTGGSKYLEYHGGLYSSIWLSAGRSYF | |
| | | ETKGAYTDICYNPYTDRGEGNMVWIDWLVKTDSRYDKT | |
| | | RSKCLIEKLPLWAAVYGYAEYCAKATGDSNIDMNARVVI | |
| | | RSPYTTPQMIDTNDSLRGFIVYSFNFGKGKMPGGTNQV | |
| | | PIRMRAKWYPCLFHQKEVLEAIGQSGPFAYHSDQKKAV | |
| | | LGLKYRFHWIWGGNPVFPQVVRNPCKDTQGSTGPRKP | |
| | | RSVQIIDPKYNTPELTIHAWDFRRGFFGPKAIKRMQQQP | |
| | | TDAELLPPGRKKSRRDTEVLQSSQERQKESLLFQQLQL | |
| | | QRRVPPWESSQGSQTETESQKEQEGTLSQQLREQLQ | |
| | | QQKLLGRQLREMFLQIHKILQNQQVNPILLPRDQALISW | |
| | | FQIQ* | |
| AB030489.1 | BAA90412.1 | MAYGWWRRRRRRWKRWRRRPRWRRRWRTRRRRPA | 238 |
| | | GRRRRRRTVRRRRRGRWRSRYRRWRRKGRRRRKEK | |
| | | LIIRQWQPNYTRKCNIVGYMPVIMCGENTVIRNYATHTY | |
| | | DCSWPGPFGGGMATQKFTLRILYDDYKRFMNYWTSSN | |
| | | EDLDLCRYRGATLYFFRDPDVDFIILINTTPPFVDTEITGP | |
| | | SIHPGMLALNKRARFIPSLKTRPGRRHIVKIKVGAPRMY | |
| | | EDKWYPQSELCDMPLLTIYATATDMQHPFGSPLTDTPV | |
| | | VTFQVLRSMYNDALSILPSNFEDDSSPGAALYKQISEYIP | |
| | | YYNTTETIAQLKRYVENTEKTQTTLNPWQSRYVNTTLFN | |
| | | TAETIANQKPYTKFADTWYRGTAYKDAIKDIPLKAAELYV | |
| | | NQTKYLLSTTFTGGSKYLEYHGGLYSSIWLSAGRSYFE | |
| | | TKGAYTDICYNPYTDRGEGNMVWIDWLSKTDSKYDKTR | |
| | | SKCLIEKLPLWASVYGYAEYCAKATGDSNIDMNARVVIR | |
| | | CPYTTPQMIDTTDPTRGFIVYSFNFGKGKMPGGSNEVPI | |
| | | RMRAKWYPCLFHQKEVLEAIGQSGPFAYHSDQKKAVL | |
| | | GLKYKFHWIWGGNPVFPQVIKNPCKNTQFSTGPRKPRS | |
| | | LQIIDPNYNTPKLTIHAWDFRLGFFGPKAIKRMQQQPTD | |
| | | AELLPPGRKRSRRDTEVLQSSQERQKGNLLFQQFQLQ | |
| | | RRVPPWESSQGSQTGTQSQKEQEGTLSQQLREQLQQ | |
| | | QKLLGRQLREMFLQLHKIQQNQHVNPTLLPRDQALICW | |
| | | FQIQ* | |
| AB038340.1 | BAA90825.1 | MAYGWWRRRRRRWRRWRRRPWRRRWRTRRRRPAR | 239 |
| | | RRGRRRNVRRRRRGGRWRRRYRRWKRKGRRRKKAKI | |
| | | IIRQWQPNYRRRCNIVGYIPVLICGENTVSRNYATHSDD | |
| | | TNYPGPFGGGMTTDKFTLRILYDEYKRFMNYWTASNED | |
| | | LDLCRYLGVNLYFFRHPDVDFIIKINTMPPFLDTELTAPSI | |
| | | HPGMLALDKRARWIPSLKSRPGKKHYIKIRVGAPKMFTD | |
| | | KWYPQTDLCDMVLLTVYATAADMQYPFGSPLTDSVVV | |
| | | NFQVLQSMYDEKISILPDQKSQRESLLTSIANYIPFYNTT | |
| | | QTIAQLKPFIDAGNVTSGTTATTANGSYINTTKFTTTATTT | |
| | | YTYPGTTTTTVTMLTSNDSWYRGTVYNNQIKDLPKKAA | |
| | | ELYSKATKTLLGNTFTTEDYTLEYHGGLYSSIWLSPGRS | |
| | | YFETPGAYTDIKYNPFTDRGEGNMLWIDWLSKKNMNYD | |
| | | KVQSKCLISDLPLWAAAYGYVEFCAKSTGDQNIHMNAR | |
| | | LLIRSPFTDPQLLVHTDPTKGFVPYSLNFGNGKMPGGS | |
| | | SNVPIRMRAKWYPTLFHQQEVLEALAQSGPFAYHSDIK | |
| | | KVSLGMKYRFKWIWGGNPVRQQVVRNPCKETHSSGN | |
| | | RVPRSLQIVDPKYNSPELTFHTWDFRRGLFGPKAIQRM | |
| | | QQQPTTTDIFSAGRKRPRRDTEVYHSSQEGEQKESLLF | |
| | | PPVKLLRRVPPWEDSQQEESGSQSSEEETQTVSQQPK | |
| | | QQLQQQRILGVKLRLLFNQVQKIQQNQDINPTLLPRGG | |
| | | DLASLFQVAP* | |
| AB038622.1 | BAA93586.1 | TAWWWGRWRRRWRPRYRRRTWRVRRRRPRRTFRR | 240 |
| | | RRRGRYVSRRRRRRYYRRRLRRGRRRGRRKRHRQTL | |
| | | VLRQWQPDIVRHCKITGWMPLIICGSGSTQNNFITHMDD | |
| | | FPPMGYSFGGNFTNLSFSLEGIYEQFLYHRNRWSRSNH | |
| | | DLDLARYKGTTLKLYRHHTLDYIVSYNRTGPFQISDMTY | |
| | | LSTHPALMLLQKHRIVVPSLLTKPKGKRSIKVRIKPPKLM | |
| | | LNKWYFTKDICSMGLFQLQATACTLYNPWLRDTTKSPVI | |
| | | GFRVLKNSIYTNLSNLPEHDQTRQAIRRKLHPDSLTGST | |
| | | PYQKGWEYSYTKLMAPIYYQANRNSTYNWLNYQTNYA | |
| | | QTFTKFKEKMNENLALIQKEYSYHYPNNVTTDLIGKNTL | |
| | | THDWGIYSPYWLTPTRISLDWETPWTYVRYNPLADKGI | |
| | | GNAVYAQWCSEQTSKLDTKKSKCIMKDLPLWCIFYGYV | |
| | | DWIIKSTGVSSAVTDMRVAIISPYTEPALIGSSPDVGYIPV | |
| | | SDTFCNGDMPFLAPYIPVGWWIKWYPMIAHQKEVFEA1 | |
| | | VNCGPFVPRDQTTPSWEITMGYKMDWLWGGSPLPSQ | |
| | | AIDDPCQKPTHELPDPDRHP RMLQVSDPTKLGPKTVFH | |
| | | KWDWRRGMLSKRSIKRVQEDSTDDEYVAGPLPRKRNK | |
| | | FDTRAQGLQTPEKESYTLLQALQESGQETSSEDQEQA | |
| | | PQEKEGQKEALMEQLQLQKQHQRVLKRGLKLLLGDVL | |
| | | RLRRGVHWDPLLS* | |
| AB038623.1 | BAA93589.1 | TAWWWGRWRRRWRPRYRKRTWRLRRRRPRRTFRRR | 241 |
| | | RRRQYVSRRRRRRYYRRRLRRGRRRGRRKRHRQTLV | |
| | | LRQWQPDVVRHCKITGWMPLIICGSGSTQNNFITHMDD | |
| | | FPPMGYSFGGNFTNLTFSLEGIYEQFLYHRNRWSRSNH | |
| | | DLDLARYKGTTLKLYRHHTLDYIVSYNRTGPFQISDMTY | |
| | | PSTHPALMLLQKHRIVVPSVLTKPKGKRSIKVRIKPPKLM | |
| | | LNKWYFTKDICSMGLFQLQATACTLYNPWLRDTTKSPVI | |
| | | GFRVLKNSIYTNLSNLPDHEGSREAIRKKLHPQSLTGHS | |
| | | PNQKGWEYSYTKLMAPIYYSANRNSTYNWLNYQDNYV | |
| | | ATYTKFKVKMTDNLQLIQKEYSYHYPNNTTTDLIKNNTLT | |
| | | HDWGIYSPYWLTPTRISLDWETPWTYVRYNPLADKGIG | |
| | | NAVYAQWCSEQTSKLDPKKSKCIMRDLPLWCIFYGYVD | |
| | | WIVKSTGVSSAVTDMRVAIRSPYTEPALIGSTEDVGFIPV | |
| | | SDTFCNGDMPFLAPYIPVGWWIKWYPMIAHQKEVFEQI | |
| | | VNCGPFVPRDQTTPSWEITMGYKMDWLWGGSPLPSQ | |
| | | AIDDPCQKPTHELPDPDRHPRMLQVSDPTKLGPKTVFH | |
| | | RWDWRRGMLSKRSIKRVQEDSTDDEYVAGPLPRKRNK | |
| | | FDTRAQGLQSPEKESYTLLQALQESGQESSSEDQEQA | |
| | | PQEKEGQKEALMEQLQLQKQHQRVLKRGLKLLLGDVL | |
| | | RLRRGVHWDPLLS* | |
| AB038624.1 | BAA93592.1 | TAWWWGRWRRRWRPRYRRRTWRVRRRRPRRTFRR | 242 |
| | | RRRGRYVSRRRRRRYYRRRLRRGRRRGRRKRHRQTL | |
| | | VLRQWQPDVLRRCKITGWMPLIICGSGSTQNNFITHMD | |
| | | DFPPMGYSYGGNFTNLTFSLEGIYEQFLYHRNRWSRSN | |
| | | HDLDLARYKGTTLKLYRHHTLDYIVSYNRTGPFQISDMT | |
| | | YLSTHPALMLLQKHRIVVPSLLTKPKGKRSIKVRIKPPKL | |
| | | MLNKWYFTKDICSMGLFQLQATACTLYNPWLRDTTKSP | |
| | | VIGFRVLKNSIYTNLSNLPDHEGAREAIRKKLHPQSLTGS | |
| | | VPNQKGWEYSYTKLMAPIYYQAIRNSTYNWLNYQQNY | |
| | | SQTYQTFKQKMQDNLQLIQKEYMYHYPNNVTTDILGKN | |
| | | TLTHDWGIYSPYWLTPTRISLDWETPWTYVRYNPLADK | |
| | | GIGNAVYAQWCSEQTSNLDTKKSKCIMKDLPLWCIFYG | |
| | | YVDWVVKSTGVSSAVTDMRVAIISPYTEPALIGSSPEVG | |
| | | YIPVSDTFCNGDTPFLAPYIPVGWWIKWYPMIAHQKEVF | |
| | | EAIVNCGPFVPRDQTTPSWEITMGYKMDWLWGGSPLP | |
| | | SQAIDDPCQKPTHELPDPDRHPRMLQVSDPTKLGPKTV | |
| | | FHKWDWRRGMLSKRSIKRVQEDSTDDEYVAGPLPRKR | |
| | | NKFDTRAQGLQSPEKESYTLLQALQESGQETSSEDQE | |
| | | QAPQEKEGQKEALMEQLQLQKQHQRVLKRGLKLLLGD | |
| | | VLRLRRGVHWDPLLS* | |
| AF254410.1 | AAF71533.1 | MAQGRRRYRRGWQRRVYLRRRRRRRRKRLVLTQWH | 243 |
| | | PAVRRKCTITGYMPVVWCGHGRASYNYAWHSDDCIKQ | |
| | | PWPFGGSLSTVSFNLKVLYDENQRGLNRWTYPNDQLD | |
| | | LGRYKGCKLTFYRTKNTNYPGPFGGGMTTDKFTLRILY | |
| | | DEYKRFMNYWTASNEDLDLCRYLGVNLYIFRHPDVDFII | |
| | | KINTMPPFLDTEITAASIHPGILALDKRARWIPSLKSRPG | |
| | | KKHYIKIRVGAPKMFTDKWYPQTDLCDMVLLTIYATAAD | |
| | | MQYPFGSPLTDTVVVNFQVLQSMYDENISILPDQKTQR | |
| | | EKLLTSISNYIPFYNTTQTIAQLKPFVDAGNKVSGTTTTT | |
| | | WASYINTTRFTTTATTTYTYPGSTTNTVTMLTSNDSWY | |
| | | RGTVYNNQIKNLPKQAAELYSKATKTLLGNTFTTEDYTL | |
| | | EYHGGLYSSIWLSPGRSYFETPGAYTDIKYNPFTDRGE | |
| | | GNMLWIDWLSKKNMNYDKVQSKCLVSDLPLWAAAYGY | |
| | | VEFCAKSTGDQNIHMNARLLIRSPFTDPQLLVHTDPTKA | |
| | | FVPYSLNFGNGKMPGGSSNVPIRMRAKWYPTLFHQQE | |
| | | VLEALAQSGPFAYHSDIKKVSLGIKYRFKWIWGGNPVR | |
| | | QQVVRNPCKEPHSSGNRVPRSIQIVDQKYNSPELTIHS | |
| | | WDFRRGFFGPKAIQRMQQQPTATEFFSAGRKRPRRDT | |
| | | EVYQSDQEKEQKESSLFPPVKLLRRVPPWEDSDRKQS | |
| | | GSQSSEEETQTVSQQLKQQLQQQRILGVKLRLLFYQIQ | |
| | | RIQQNQDINPTLLPRGGDLASLFQIA* | |
| AB050448.1 | BAB9928.1 | MAWTWWWQRRRRRWPWRRRRWRRLRTRRPRRLVR | 244 |
| | | RRRKRYRVRRRRRWGRRRGRRTYLRRGLKKRKRRKK | |
| | | LRLTQWNPSTIRGCTIKGMAPLIVCGHTMAGNNFAIRME | |
| | | DYVSQIKPFGGSFSTTTWSLKVLWDEHTRFHNTWSYP | |
| | | NTQLDLARFKGVTFYFYRDKDTDFIITYSSVPPFKIDKYS | |
| | | SAMLHPGMLMQRKKKILLPSFTTRPRGRKKVKVHIKPP | |
| | | VLFEDKWYTQQDLCDVNLLSLAVSAASFRHPFCPPQTD | |
| | | NICITFQVLKDKYYTQMSVTPDTAGTKKDDEILDHLYSTA | |
| | | EYYQTVHTQGIINKTQRVAKFSTSNNTLGDQSEISLYLN | |
| | | QPTTTNIGNTLSTGHNSVYGFPSYNPQKDKLRKIADWF | |
| | | WTQEANKENVVTGSYSMPTNKAVGYHLGKYSPIFLSSY | |
| | | RTNLQFRTAYTDVTYNPLNDKGKGNEIWVQYVTKPDTV | |
| | | FNPTQCKCHVIDLPLWSAFHGYIDFVQSELGIQEEILNIAI | |
| | | IVVICPYTKPKLVHETNPKQGFVFYDTQFGDGKMPEGS | |
| | | GLVPIYYQNRWYPRIKFQSQVVHDFILTGPFSYKDDLKS | |
| | | TVLTVEYKFKFLWGGNMIPEQVIRNPCKTEGHDLPHTS | |
| | | RLHRDLQVVDPHTVGPQWALFITANDWRRGLFGSEAIKR | |
| | | VSEQQVHDELYYPPSKKPRFLPPISGLQEQERDYSSQE | |
| | | EKEQSSSEEETDPKKKEQKQQQRLHLQFQEQQRLGNQ | |
| | | LRLIFRELQKTQAGLHLNPMLSNRL* | |
| AY026465.1 | AAK01940.1 | MAWGWWKRRRRWWFRKRWTRGRLRRRWPRPARRR | 245 |
| | | PRRRRVRRRRRWRRGRPRRRLYRRYRRKKRRRRKPK | |
| | | IILKQWQPDIVKRCYIVGYIPAIICGAGTWSHNYTSHLLDII | |
| | | PKGPFGGGHSTMRFSLKVLFEEHLRHLNFWTRSNQDL | |
| | | ELVRYFRCSFRFYRDQHTDYLVHYNRKTPLGGNRLTAP | |
| | | SLHPGVQMLSKNKIIVPSYDTKPKGKSYVKVTIAPPTLLT | |
| | | DKWYFAKDVCDTTLVNLDVVLCNLRFPFCSPQTDNPCI | |
| | | TFQVLHSIYNDFLSIVDTQEYKNNFVTTLSTKLGTTWGS | |
| | | RLNTFRTEGCYSHPKLPKKQVTAANDSTYFTQPDGLW | |
| | | GDAVFETKDTTIITKNMESYATSAKQRGVNGDPAFCHLT | |
| | | GIYSPPWLTPGRISPETPGLYTDVTYNPYADKGVGNRI | |
| | | WVDYCSKKGNKYDNTSKCLLEDMPLWMVTFGYVDWV | |
| | | KKETGNWGIPLWARVLIRSPYTVPKLYNEADPSYGWVP | |
| | | ISYYFGEGKMPNGDMYVPFKVRMKWYPSMWNQEPVL | |
| | | NDLAKSGPFAYKDTKTSVTVTTKYKFTFNFGGNPVPSQI | |
| | | VQDPCTQPTYDIPGTGNLPRRIQVIDPKVLGPHYSFHR | |
| | | WDFRRGLFGQQAIKRVSEQQTTSEFLFSGPKRPRIDQG | |
| | | PYIPPEKGSDSLQRESRPWSTSESEAETEAPSEEEPEN | |
| | | QEEQVLQLQLRQQLREQRKLRQGIQCLFEQLITTQQGV | |
| | | HKNPLLE* | |
| AY026466.1 | AAK01942.1 | MAYGWWARRRRRWRRWKRRPWRRRWRTRRRRPRR | 246 |
| | | RYRRRRHVRRRRRGRWRRRYRKWRRKGRRRGKKKIII | |
| | | RQWQPNYRRRCNIIGYMPVLICGNNTVSRNYATHSDDS | |
| | | YLPGPFGGGMTTDKFTLRILYDEYCRFMNYWTASNEDL | |
| | | DLCRYRGCTLWFFRHPDVDFIILINTMSPFLDTQLTGPSI | |
| | | HPGLMALNKRARWIPSLKSRPGRKHVVKIRVGAPRMFT | |
| | | DKWYPQSDLCDLPLLTIFASAADMQYPFGSPLTDSVVV | |
| | | GFQVLQSMYNDCLSILPENFNGNGKGKALHDNITKYLP | |
| | | NYNTTQTLAQLKPYIDNTSTGSTNNWSSYVNTSKFTTA | |
| | | SKTITTSAEGPYYTFADTWYRGTAYNNSITNVPLQAAQL | |
| | | YHDTTKKLLGTTFTGGSPYLEYHGGLYSSIWLSAGRSY | |
| | | FETKGTYTDITYNPFTDRGQGNMVWIDWVSKYDSVYSK | |
| | | TQSKCLIENLPLWASVYGYAEYCSKSTGDTNIEQNCRV | |
| | | VIRSPFTNPQLLDHNNPLRGYVPYSINFGNGKMPGGSS | |
| | | QVPIRMRSKWYPTLFHQKEVLEAIAQAGPFAYHSDQMK | |
| | | VSLGMKYAFKWVWGGNPVSQQVVRNPCKDTGVSSGN | |
| | | RVPRSVQIVDPKYNTPELAIHAWDFRRACLAQKLLREC | |
| | | KQNRTLLNFFRQGEKDTGETQKLYSPAKKNNKKKTYFS | |
| | | SQSSSSDQSPVGGVGPKPKRGRGGPTRDADTLPAAPA | |
| | | AAQGAAAHGGPTPSPVPTITTGPTKHTYRPYLFARGAG | |
| | | VTSLFQTA* | |
| AF345521.1 | AAK11696.1 | MAWWGRWRRWPRRRWRRWRRRRRRRLPTRRTRRA | 247 |
| | | VRGLGRRPRKTVRRRRRRPRRTYRRGWRRRRYIRRR | |
| | | RGRRKKLTLTMWNPNIVRRCNIEGGLPLILCGENRAAFN | |
| | | YAYHSEDYTEQPFPFGGGMSTTTFSLRGLYDQYTKHM | |
| | | NRWTFSNDQLDLARYRGCKFRFYRHPTCDFIVHYNLVP | |
| | | PLKMNQFTSPNTHPGLLMLTKHKIIIPSFLTRPGGRRFVK | |
| | | IRLPPPKLFEDKWYTQQDLCKQPLVTLTATAASLRYPFC | |
| | | SPQTNNPNCTFQVLRKNYHKVIGTSSTNSEDVTPFENW | |
| | | LYNTASHYQTFATEAQVGRIPSFNPDGTKNTKESEWQN | |
| | | YWSKKGEPWNPNSSYPHTTTNQMYKIPFDSNYGFPTY | |
| | | KPIKEYMLQRRAWSFKYETDNPVSKKIWPQPTTTKPTID | |
| | | YYEYHAGWFSNIFIGPNRHSLQFQTAYVDTTYNPLNDK | |
| | | GKGNKIWFQYHSKVNTDLRDRGIYCLLEDMPLWSMTF | |
| | | GYSDYVSTQLGPNVDHETQGLVCIICPYTEPPMYDKTN | |
| | | PNSGYVAYDTNFGNGKMPSGRSQVPVYWQCRWRPML | |
| | | WFQQQVLNDISKSGPYAYRDELKNCCLTAYYNFIFDWG | |
| | | GDMYYPQVIKNPCADSGLVPGTSRFTREVQVVSPLSM | |
| | | GPQYILHLFDQRRGFFSSNALKRMQQQQEFDESFTVKP | |
| | | KRPKLSTAAHVEQQEEDSSSRERKSGSSQEEVQEEVL | |
| | | QTPEIQLHLQRNIREQLHIKQQLQLLLLQLFKTQANIHLN | |
| | | PRFISP* | |
| AF345522.1 | AAK11698.1 | MAWRRWRWRPWWRRRRRRRWRRRRRRPRRRRPYR | 248 |
| | | RRRPRRVRRRRGRWRRAYRRWGRRRRRRRHKKKLVL | |
| | | TQWQPAVVKRCLIVGFDPLIICGINRTIFNYTTHSEDFTF | |
| | | NNDSFGGGLCTAQYTLRILFQEKLAQHNFWSASNEDLD | |
| | | LARYLGATIVLYRHPTVDFLVRIRTSPPFEDTDMTAMTL | |
| | | HPGMMMLAKKTIKIPSLKTRPSRKHVVRIRVGAPKLFED | |
| | | KWYPQNELCDVTLLTIQATTADFQYPFGSPLTNSPCCN | |
| | | FQVLNSNYDNAHSILNLSNEPTNKWHTYRNNCYKFLLE | |
| | | QYSYYNTKQVVAQLKYKWNPNQNPTMPNTSNASLSKK | |
| | | PDDLTKTKTTNEYPHWDTLYGGLAYGHSTVTPGTTSSP | |
| | | TDLKTQMLTGNEFYTTAGKKLIDTFHPIPYYENGSSKAN | |
| | | TNIFDYYTGMYSSIFLSSGRSNPEVKGSYTDISYNPLTD | |
| | | KGVGNMIWIDWLTKGDTVYDPKKSKCLLSDFPLWSLCY | |
| | | GYPDYCRKQTGDSGIYYDYRVLIRCPYTYPQLIKHNDKY | |
| | | FGFVVYSENFGLGRLPGGNPNPPTRMRLHWYPNMFH | |
| | | QTEVLECIAQSGPFAYHGDERKAVLTAKYKFRWKWGG | |
| | | NPVFQQVLRDPCTGGAVAPHTSRHPRAIQVHDPKYQA | |
| | | PEYLFHKWDFRRGLFSTKGIKRVSEQPVHDEYFTGSSK | |
| | | RPKKDTNPSPQGEEQKEGSRFRVPELRPWLPSSQETQ | |
| | | SQSEQEETAPKTVQEQLQEQLQQQQLMGIQLRNVCLQ | |
| | | LARVQAGHSLHPVFQCHA* | |
| AF345525.1 | AAK11704.1 | MAWGWWRRRRKWWWRRRFARSRLRRRRIRRPRRRT | 249 |
| | | RRRTVRRRRQWRRGRPRRRLFKRKRRFKRRRRKAKIK | |
| | | ITQWQPSSVKRCFVIGYFPLVICGPGRWSENFTSHIEDK | |
| | | ISKGPFGGGHSTSRWSLKVLYEEFQRHHNFWTRSNKD | |
| | | LELVRFFGSSWRFYRHEDTDYIVYYSRKAPLGGNLLTA | |
| | | PSLHPGAAMLSKHKIVVPSFKTRPGGKPTVKINIKPPTTL | |
| | | IDKWYFQKDICDTTFLNLNVVLCNLRFPFCSPQTDNICV | |
| | | TFQILHEVYFINYISITAKELLTGTEWRQYYKNFLNAALPN | |
| | | DRSVNKLNTFSTEGAYSHPQIKKHTENITGSGDKYFRKK | |
| | | DGLWGDAIHITDQQNRTEVIDLILKNAENYLKKVQQEYQ | |
| | | GQENLKNLIHPVFCQYVGIFGQPTTKLPQNKPRNSRPV | |
| | | QRHNI* | |
| AF345527.1 | AAK11708.1 | MSWWGWRRRWWWKPRRRWRRRRARRPRRLPRRRY | 250 |
| | | RRPTRRYRGRRVRRRRAGGWRGRRRYSRRYSRRLTV | |
| | | RRKKKKLTLKIWQPQNIRRCKIRGLLPLLICGHTRSAFNY | |
| | | AIHSDDKTPQQQSFGGGLSTVSFSLKVLFDPNQRGLNR | |
| | | WSASNDQLDLARYTGCTFWFYRHKKTDFIVQYDVSAPF | |
| | | KLDKNSCPSYHPFMLMKAKHKVLIPSFDTKPKGREKIKL | |
| | | RIQPPKMFIDKWYTQEDLCPVILVTLVATAASFTHPFCSP | |
| | | QTANPCITFQVLKEFYYQAMGYGTPETTMSTIWNTLYTT | |
| | | STYWQSHLTPQFVRMPKNNPDNTANTEANKFNEWVDK | |
| | | TFKTGKLVKYNYNQYKPDIEKLTLLRQYYFRWETQHTG | |
| | | VAVPPTWTTPTTDRYEYHVGMFSPIFLTPYRSAGLDFP | |
| | | YAYADVTYNPLTDKGVGNRMWYQYNTKIDTQFDAKCC | |
| | | KCVLEDMPLYAMAFGHADFLEQEIGEYQDLEANGYVCV | |
| | | ISPYTKPPMFNKHNPQQGYVFYDSQWGNGKWIDGTGF | |
| | | VPVYWLTRWRVELLFQKQVLSDLAMSGPFSYPDELKN | |
| | | TVLTAKYRFDFKWGGNLFHQQTIRNPCKPEETSTGRIP | |
| | | RDVQVVDPVTMGPRFVFHSWDWRRGFLSDRALKRMF | |
| | | EKPLDFEGFTATPKRPRILPPTEGQLAREQKEQEESSD | |
| | | SQEESSLTPLEEVPQETKLRLHLRKQLREQRSIRHQLRT | |
| | | MFQQLVKTQAGLHLNPLLSSQL* | |
| AF345528.1 | AAK11710.1 | MWNPSTIRACNIKGAINLVMCGHTQAGRNYAIRSEDFY | 251 |
| | | PQIQSFGGSFSTTTWSLRVLFDEYQKFHNFWTYPNTQL | |
| | | DLCRYKYAIFTFYRDPKVDYIVIYNTNPPFKINKYSSPFLH | |
| | | PGLMMLQKKKILIPSFQTKPGGKSRIKVKIKPPALFEDK | |
| | | WYTQQDLCPVNLLSLAVSACSFIHPFCSPESDTICMTFQ | |
| | | VLREFYYTHLTVTPTTTTSTPEKDKKIFNDQLYSNANFY | |
| | | QSLHASAFLNIAQAPAIHGHNGIPNNSRYLSSTGTETSF | |
| | | RTGNNSIYGQPNYKPIPEKLTEIRKWFFKQATTPNEIHG | |
| | | TYGKPTYDAVDYHLGKYSPIFLSPYRTNTQFPTAYMDVT | |
| | | YNPNVDKGKGNKIWLQSVTKETSDFDSRSCRCIIENLP | |
| | | MWAMVNGYSDFAESELGSEVHAVYVCCIICPYTKPMLY | |
| | | NKTNPAMGYIFYDTLFGDGKLPSGPGLVPFYWQSRWY | |
| | | PKLAWQQQVLHDFYLCGPFSYKDDLKSFTINTTYKFKFL | |
| | | WGGNMIPEQVIKNPCKTTDPTYTLSDRQRRDLQVVDPI | |
| | | TMGPQWEFHTWDWRRGLFGQNALRRVSEKPGDDAEY | |
| | | YAPPKKPRFFPPTDLEEQEKDSDSQEETRLLFHPSPPR | |
| | | SQEEIQQEQQRDIHLRLGQQLRIRQQLQQVFLQVLKTQ | |
| | | ANLHINPLFLNQQ* | |
| AF345529.1 | AAK11712.1 | MAWGWWRRWRRWPTRRWRRRRRRRPVRRTRARRP | 252 |
| | | ARRYRRRRTVRTRRRRWGRRRYRRGWRRRTYVRKG | |
| | | RHRKKKKRLVLRQWQPATRRRCTITGYLPIVFCGHTKG | |
| | | NKNYALHSDDYTPQGQPFGGALSTTSFSLKVLYDQHQ | |
| | | RGLNKWSFPNDQLDLARYRGCKFYFYRTKQTDWVGQ | |
| | | YDISEPYKLDKYSCPNYHPGNMIKAKHKFLIPSYDTNPR | |
| | | GRQKIIVKIPPPDLFVDKWYTQEDLCDVNLVSFAVSAAS | |
| | | FLHPFGSPQTDNPCYTFQVLKEFYYQAIGFSATEEKIQN | |
| | | VFNILYENNSYWESNITPFYVINVKKGSNTAQYMSPQIS | |
| | | DADFRNKVNTNYNWYTYNAKTHKEKLKTLRQAYFKQLT | |
| | | SEGPQHTSSHAGYATQWTTPSTDAYEYHLGMFSTIFLA | |
| | | PDRPVPRFPCAYQDVTYNALMDKGVGNHVWFQYNTKA | |
| | | DTQLILTGGSCKAHIENIPLWAAFYGYSDFIESELGPFVD | |
| | | AETVGLICVICPYTKPPMYNKTNPMMGYVFYDRNFGDG | |
| | | KWTDGRGKIEPYWQVRWRPEMLFQETVMADIVQTGPF | |
| | | SYKDELKNSTLVCKYKFYFTWGGNVMFQQTIKNPCKTD | |
| | | EQPTDSGRHPRGIQVADPEQMGPRWVFHSFDWRRGY | |
| | | LSEKALKRLQEKPLDYDEYFTQPKRPRMFPPTESAEGE | |
| | | FREPEKGSYSEEERSQASAEEQTKEATVLLLKRRLREQ | |
| | | QQLQQQLQFLTREMFKTQAGLHLNPMLLNQR* | |
| AF371370.1 | AAK54731.1 | MRFSRIYRPKKGPLPLPLVRAEQKKQPSDMSWRPPLH | 253 |
| | | NGAGIERQFFEGCFRFHASCCGCGNFVTHITLLAARYG | |
| | | FTGGPTPPGGPGALPSLRRALPPPPAPQDQAEPELWR | |
| | | GRGGGGEGNAGGRAEGGDGEGYEPEELEELFRAAAA | |
| | | DDE* | |
| AB060596.1 | BAB69916.1 | MAFRWWWWRRRPQRRWTRRRWRRLRTRRPRRTVR | 254 |
| | | RRRRRPRVRRRRWGRRRGRRRLYRRTYRKRRKRRKK | |
| | | MTLKMWNPSTIRACNIRGFIALVVCGHTRAGCNYAIHSE | |
| | | DYIPQLRPYGGSFSTTTWSLKLLFDEYLKFRNKWSYPN | |
| | | TELNLARYRGATFTFYRDPKVDYIVVYNTVPPFKLNKYS | |
| | | CPMLHPGMMMQYKKKVLIPSYQTKPKGKAKIRLRIKPP | |
| | | VLFEDKWYTQQDLCPVNLLSLAVSACSFLHPFIPPESDN | |
| | | ICITFQVLRDFYYTQMSVTPTTTTSLNQKDEKIFSDHLYK | |
| | | NPEYWQSHHTAARLSTSQKPALRNKEEIPNDHGYLNTT | |
| | | PTDSTFRTGNNTIYGQPSYRPNYTKLTKIREWYFTQENT | |
| | | DNPINGSYLKPTLNSVDYHLGKYSAIFLSPYRTNTQFDT | |
| | | AYQDVTYNPNTDKGKGNKIWIQSCTKESTILDNACRCVI | |
| | | EDMPLWAMVNGYLEFCDSELPGANIYNTYIVVVICPYTK | |
| | | PQLLNKTNPKQGYVFYDTLFGDGKMPTGTGLVPFWLQ | |
| | | SRWYPRAEFQQQVLHDLYLTGPFSYKDDLKSFSFNAKY | |
| | | KFSFLWGGNMIPQQIIKNPCKKEESTFTYPSREPRDLQV | |
| | | VDPLTMGPEWVFH-RNDWRRGLFGKNAVDRVSKKPDD | |
| | | DAEYYPVPKRPRFFPPTDTQSEPEKDFGFTPESQELQQ | |
| | | EDLRAPQEESQEVQQQRLLQLRLSQQFRLRQQLQHLF | |
| | | VQVLKTQAGLHINPLFLNHA* | |
| AB060592.1 | BAB69900.1 | MAWTWWWQRRRRRWPWRRRRWRRLRTRRPRRLVR | 255 |
| | | RRRKRYRVRRRRRWGRRRGRRTYLRRRLKKRKRRKK | |
| | | LRLTQWNPSTIRGCTIKGMAPLIICGHTMAGNNFAIRME | |
| | | DYVSQIRPFGGSFSTTTWSLKVLWDEHTRFHNTWSYP | |
| | | NTQLDLARFKGVNFYFYRDKDTDFIVTYSSVPPFKMDK | |
| | | YSSAMLHPGTLMQRKKKILIPSFTTRPRGRKKVKLHIKP | |
| | | PVLFEDKWYTQQDLCDVNLLSLAVSAASFRHPFCPPQT | |
| | | DNICITFQVLKDFYYTQMSVTPDTAGQEKDIEIFEKHLFK | |
| | | NPQFYQTVHTQGIISKTRRTAKFSTSNNTLGSDTNITPYL | |
| | | EQPTATNHKNTLSTGNNSIYGLPSYNPIPDKLKKIQEWF | |
| | | WKQETDKENLVTGSYQTPTNKSVSYHLGKYSPIFLSSY | |
| | | RTNLQFITAYTDVTYNPLNDKGKGNQIWVQYVTKPDTIF | |
| | | NERQCKCHIVDIPLWAAFHGYIDFIQSELGIQEEILNIAIIV | |
| | | VICPYTKPKLVHDPPNQNQGFVFYDTQFGDGKMPEGS | |
| | | GLVPIYYQNRWYPRIKFQSQVVHDFILTGPFSYKDDLKS | |
| | | TVLTVEYKFKFLWGGNMIPEQVIRNPCKTEGHDLPHTS | |
| | | RLHRDLQVVDPHTVGPQWALFITANDWRRGLFGSEAIKR | |
| | | VSEQQVHDELYYPASKKPRFLPPISGLQEQERDYSSQE | |
| | | EKDQSSSEEEKDPKKKEQKQQQRLHLQFQEQQRLGN | |
| | | QLRLIFRELQKTQAGLHINPMLSNRL* | |
| AB060593.1 | BAB69904.1 | MAWRWWWRRRWKPRRRPAWTKYRRRRWRRLRPRR | 256 |
| | | PRRLARGRRRRRTVRRRRVRRLRRRRGWTRRRYLRR | |
| | | RKRRKLILTQWNPNIVRRCSIKGIIPLTMCGANTASFNYG | |
| | | MHSDDSTPQPEKFGGGMSTVTFSLYVLYDQFTRHMNR | |
| | | WSYSNDQLDLARYRGCSFKLYRNPTTDFIVQYDNNPP | |
| | | MKNTILSSPNTHPGMLMQQKHRILVPSWQTFPRGRKYV | |
| | | KVKIPPPKLFEDHWYTQPDLCKVPLVTLRSTAADFRHPF | |
| | | CSPQTNNPCTTFQVLRENYNEVLGLPYANTGSNNEVKI | |
| | | KIDNFENWLYNSSVHYQTFQTEQMFRPKQYNADGSTW | |
| | | KDYKSMLSTWTSQIYNKKTDSNYGYASYDFSKGKEFAT | |
| | | QMRQHYWVQLTQLTATVPHIGPTYSNTTTPEYEYHAG | |
| | | WYSPVFIGPNRHNIQFRTAYMDVTYNPLNDKGQFNRV | |
| | | WFQYSTKPTTDFNNTQCKCVLENIPLWSALFGYSEYVE | |
| | | SQLGPFQDHGTVGVVVVQCPYTVPPMYNKEKPDMGYV | |
| | | FYDTHFGNGKLGNGSGQVPRYWQMRWYPILKRQKQV | |
| | | MNDICKTGPFSYRDELLQVDLASPYTFRFNWGGDLLYH | |
| | | QVIKDPCSSSGLAPTDSSRFKRDVQVVSPLTMGPRLLF | |
| | | HSFDQRRGFFTPGAIKRMHDEQINVPDFTQKPKIPRIFP | |
| | | PVELRERAEAEEDSGSEKASFTSSQEREAEAQEKLPIQ | |
| | | LQLRQQLRQQQQLRVHLQQVFLQLQKTKAHLHINPLFL | |
| | | AQGNM* | |
| AB060595.1 | BAB69912.1 | MAYSYWWRRRRWPWRGRWRRWRRRRRIPRRRPRR | 257 |
| | | PVRRYRRRPVRRKRRWGRRGRRRRYTRRYRRRLTVR | |
| | | RKRNKLRLSVWQPQNIRYCAIKGLFPILICGHGKSAGNY | |
| | | AIHSDDFITSRFSFGGGLSTTSYSLKLLFDQNLRGLNRW | |
| | | TASNDQLDLARYLGAIFWFYRDQKTDYIVQYDISEPFKID | |
| | | KDSSPSFHPGILMKSKHKVLVPSFQTWPKGRSKVKLKIK | |
| | | PPKMFVDKWYTQEDLCTVTLVSLVVSLASFQHPFCRPL | |
| | | TDNPCVTFQVLQNFYNNVIGYSSSDTLVDNVFTSLLYSK | |
| | | ASFWQSHLTPSYVKKINNNPDGSSISQRVGTMPDMTEY | |
| | | NKWVSNTNIGTGFVNSNVSVHYNYCQYNPNHTHLTTLR | |
| | | QYYFFWETHPAAANKTPVTHVPITTTKPTKDWWEYRLG | |
| | | LFSPIFLSPLRSSNIEWPFAYRDIIYNPLMDKGVGNMMW | |
| | | YQYNTKPDTQFSPTSCRAVLEDKPIWSMAYGYADFLLSI | |
| | | LGEHDDVDFHGLVCIICPYTRPPLFDKDNPKMGYVFYD | |
| | | AKFGNGKWIDGTGFIPVEFQSRWKPELAFRKDVLTDLA | |
| | | MSGPFSYSDDLKNTTIQAKYKFKFKWGGNLSYHQTIRN | |
| | | PCTSDGQTPTTSRQSREVQ1VDPLTMGPRYVFHSWDW | |
| | | RRGWLNDRTLKRLFQKPLDFEEYPKSPKRPRIFPPTEQ | |
| | | LQEDPQEQERDSSSSEESLPTSSEETPPAHLLRVHLRK | |
| | | QLRQQRDLRVQLRALFAQVLKTQAGLHINPLLLAPQ* | |
| AB064596.1 | BAB379314.1 | TAWWWGRRWRRRPWGRWRRRRRVWRRRPRTAVRR | 258 |
| | | RRGRRYVSRRRRYRRRLRRRGRRRYRGRRKKRQTLV | |
| | | LKQWQPDVNRLCRITGWLPLIVCGTGRAQDNFIVHSEDI | |
| | | TPRGAAYGGNLTHITANCLEAIYQEFLMHRNRWSRSNH | |
| | | DLDLCRYQGVVFKAYRHPKVDYILAYTRTPPFQATELSY | |
| | | MSCHPLLMLTAKHRIVVKSQETKKGGKKYVKFRIKPPRL | |
| | | MLNKWYFTHDFCKVPLFSMWASACDLRNPWLREGALS | |
| | | PTVGFFALKPDFYPNLSILPNEVSQQFDFFLNSAHPPSI | |
| | | QSEKDVRWEYTYTNLMRPIYNQTPSLKASTYDWQNYS | |
| | | NPNNYQACHQQFIAFKAQRFAKIKAEYQTVYPTLTTQTP | |
| | | QSEALTQEFGLYSPYYLTPTRISLDWHTVFHHIRYNPMA | |
| | | DKGLGNMIWVDWCSRKEATYDPTRSKCMLKDLPLYMR | |
| | | FYGYCDWVTKSIGSETAWRDMRLMVVCPYTEPQLMKK | |
| | | NDKTWGYVIYGYNFANGNMPWLQPYIPISWFORWFPCI | |
| | | THQREAMESVVATGPFMVRDQDRNSWDITIGYKFLWR | |
| | | WGGSPLPTQAIDDPCQQGTHPLPEPGTLPRILQVSDPT | |
| | | QLGPKTIFHLWDQRRGLFSKRSIERMSEYKGTDDLFSP | |
| | | GRPKRPKLDTRPEGLPEEQRGAYNLLQALEDSAQSEE | |
| | | SDQEEMPPLEEEQVLHEQKKEALLQQLQQQKHHQRVL | |
| | | KRGLRLLLGDVLKLRRGLHIDPVLT* | |
| AB064597.1 | BAB79318.1 | TAWWWGRWRRRWRRRRPWRPRLRRRRARRAFPRR | 259 |
| | | RRRRFVSRRWRRPYRRRRRRGRRRRRRRRRHKPTLV | |
| | | LRQWQPDVIRHCKITGRMPLIICGKGSTQFNYITHADDIT | |
| | | PRGASYGGNFTNMTFSLEAIYEQFLYH RN RWSASNHDL | |
| | | ELCRYKGTTLKLYRHPDVDYIVTYSRTGPFEISHMTYLS | |
| | | THPLLMLLNKHHIVVPSLKTKPRGRKAIKVRIRPPKLMNN | |
| | | KWYFTRDFCNIGLFQLWATGLELRNPWLRMSTLSPCIG | |
| | | FNVLKNSIYTNLSNLPQHREDRLNIINNTLHPHDITGPNN | |
| | | KKWQYTYTKLMAPIYYSANRASTYDLLREYGLYSPYYL | |
| | | NPTRINLDWMTPYTHVRYNPLVDKGFGNRIYIQWCSEA | |
| | | DVSYN RTKSKCLLQDMPLFFMCYGYIDWAIKNTGVSSL | |
| | | ARDARICIRCPYTEPQLVGSTEDIGFVPITETFMRGDMP | |
| | | VLAPYIPLSWFCKWYPNIAHQKEVLEAIISCSPFMPRDQ | |
| | | GMNGWDITIGYKMDFLWGGSPLPSQPIDDPOQQGTHPI | |
| | | PDPDKHPRLLQVSNPKLLGPRTVFHKWDIRRGQFSKRS | |
| | | IKRVSEYSSDDESLAPGLPSKRNKLDSAFRGENPEQKE | |
| | | CYSLLKALEEEETPEEEEPAPQEKAQKEELLHQLQLQR | |
| | | RHQRVLRRGLKLVFTDILRLRQGVHWNPELT* | |
| AB064599.1 | BAB79326.1 | TAWWRYRRRPWRRWRRRRWGLRTRRPRRTFRRRRA | 260 |
| | | RRYVSRGRRRRYRRRRRRGRRRRGRRRRHRKTLIVR | |
| | | QWQPDVIKRCFITGWLPLIICGNGHTQFNFITHMDDIPPK | |
| | | NASYGGNFTNLTFNLACFYDEFMHHRNRWSASNHDLE | |
| | | LVRYIRTSLKLYRHESVDYIVCYTTTGPFETNEMSYMLT | |
| | | HPLAMLLSKRHVVVPSLKTKPHGRKYKKITIKPPKLMLN | |
| | | KWYFATDLCHIGLFQLWATGLELRNPWLRSGTNSPVIG | |
| | | FYVLKNQVYKNRYSNLNTTEAHNARQDAWNELTQTKT | |
| | | NDKWYNWQYTYNKLMKPIYYAASNESSNSAMKGKTYN | |
| | | WKHYKEYFSNTQTKWKTIIKDAYDLVREEYQQLYTTTM | |
| | | AYPPPWQSTTSNTGRQYLEHDCGIYSPYFLTPQIYSPE | |
| | | WHTAWSYIRYNPLTDKGIGNRVCVQYCSEASSDYNPIK | |
| | | SKCMLQDMPLWMMLYGYADYVVKSTGIQSAWTDMRV | |
| | | AIRCPYTDPKLVGSTENTMFIPIGLEFMNGDIPDKRPYIP | |
| | | LIWWFKWYPMITHQKTAIEAIVSCSPFMPRDQEQASW | |
| | | DITVGYKATFLWGGSPLPPQPIDDPCQKGKHDIPDPDT | |
| | | NPPRIQISDPQHLGPATLFHSWDLRRGYINTKSIKRISEH | |
| | | LDANEYFSTGVVSKKPRFDTPHHGQLSNQEEDALSILR | |
| | | QPQKEQEETTSEEEQALQKEEEQKEKLLQQLRVQRQH | |
| | | QRVLRQGIKHLMGDVLRLRQGVHWNPVL* | |
| AB064600.1 | BAB79330.1 | TAWGWYRRRRWRPWRRRRWAIRRRRPRRTVRRRGR | 261 |
| | | RRYVSRWPRRRYRRRRRRTRRRGGRKRRHRQTLILR | |
| | | QWQPDVMKKCFITGWMPLIICGTGNTQFNFITHEDDVP | |
| | | PKGASYGGNLTNLTFTLEGLYDEHLLHRNRWSRSNFDL | |
| | | DLSRYLYTIIKLYRHESVDYIVTYNRTGPFEISPLSYMNT | |
| | | HPMLMLLNKHHVVVPSPKTKPKGKRAIKIKIKPPKLMLN | |
| | | KWYFARDTCRIGLFQLYATGANLTNPWLRSGTNSPVVG | |
| | | FYVIKNSIYQDAFDNLADTEHTNQRKNVFENKLYPTTTT | |
| | | NKDNWQYTYTSLMKNIYFKTKQEAENQTMSSTYNFDTY | |
| | | KTNYDKVRTKWIKIAEDGYKLVSKEYKEIYISTATYPPQ | |
| | | WNSRNYLSHDYGIYSPYFLTPQRYSPQWHTAWTYVRY | |
| | | NPLTDKGIGNRIFVQWCSEKNSSYNSTKSKCMLQDMPL | |
| | | FMLTYGYLDYVLKCAGSKSAWTDMRVCIRSPYTEPQLT | |
| | | GNTDDISFVIISEAFMNGDMPYLAPHIPVSLWFKWYPMIL | |
| | | HQKAALETIVSCGPFMPRDQEANSWDITAGYKAVFKW | |
| | | GGSPLPPQPIDDPYQKPTHEIPDPDKHPPRLQIADPKIL | |
| | | GPSTVFHTWDIRRGLFSTASLKRVSEYQPPDDLFSTGV | |
| | | ASKRPRFDTPVQGQLESQEEESYRLLRALQKEQETSSS | |
| | | EEEQPQNQEIQEKLLLQLQQQRQQQRLLAKGIKHLLGD | |
| | | VLRLRKGVHWDPVLT* | |
| AB064601.1 | BAB79334.1 | TAWYRRRRWRPWRRRRRPWTLRRRRARRFVRRRPR | 262 |
| | | RRYVSRWRRRRYRRRLRRGRRRRGRRRRKETIIVRQW | |
| | | QPDVMRNCYITGFLPLIVCGSGNTQFNFITHENDIPPRG | |
| | | ASYGGNLTNITFTLAALYDQYLLHRNRWSRSNFDLDLA | |
| | | RYINTKLKLYRHDSVDYIVTYNRTGPFEVNPLTYMHTHP | |
| | | LLMLVNRHHIVVPSLKTKPRGKRYIKVKIKPPKLMLNKW | |
| | | YFAKDICPLGLFQLYATGLELRNPWIREGTNSPIVGFYVL | |
| | | KPSLYNGAMSNLADTEHLNQRQTLFNKLLPTQNQKDE | |
| | | WQYTYNKPMQKIYYEAANKQDSGFKNTTYNWTNYKTN | |
| | | YQKVQSQWQTVAQQNYNQVYNEFKEVYPLTAMVPPQ | |
| | | WNARQYMSHDFGIYSPYFLSPARFTDYWHSAYTYVRY | |
| | | NPMSDKGIGNIICIQWCSEKNSEFNETKNKCILRDMPLY | |
| | | MLTYGYLDYTTKCTGSNSIWTDARVAIRCPYTDPPLSNP | |
| | | TNKNTLYIPLSTSFMQGDMPWPTTNIPLKMWFKWYPMI | |
| | | MHQRACLETIVSCGPFMPRDQTASSWDITIAYRAFFKW | |
| | | GGNPLPPQPIDDPCQKDTHEIPDPDKHPRGIQISDPKVL | |
| | | GPPTVFHTWDIRRGLFSSTSLKRVSEYQPPDDPFSTGV | |
| | | VFKRPRLETQYKGTQETPEEDAYTLLKALQKEQESSSS | |
| | | EEELPQEEQEIQKTQLLKQLQLQQQQQRILKRGIRHLFG | |
| | | DVLRLRKGVHSNPDLL* | |
| AB064602.1 | BAB79338.1 | TAWYRYRRRPWRRRRRPRWGLRRRRFRRSFRGRGR | 263 |
| | | RRYVSRWSRRRYRRRRRRGRRRRGRRRRKRQTLIPR | |
| | | QWQPDVTKKCFITGWMPLIICGTGHTQFNFITHEEDIPG | |
| | | AGASYGGNLTNITITLGGLYEQYMLHRNHWSRSNYDLE | |
| | | LARYLGFTLKCYRHATVDYILTYSRTTPFETNELSHMLT | |
| | | HPLLMLLNKHHRVIPSLKTRPKGKRSVRIHIKPPKLMINK | |
| | | WYFAKDLCNIGPCQIYATGLELSNPWLRSGTNSPVIGF | |
| | | WVLKNHLYDGNLSNIASGEQLTARQTLFTTKLLPSNNTK | |
| | | DEWQYAYTPLMKTFYTQAANTAAHNITDKTYNWKNYKT | |
| | | HYDKVQQTWTTKAQFNYDLVKEEYKTVYPTTATFPPE | |
| | | WSNRQYLEHDYGLFSPYFLTPNRYSTEWHMPITYVRYN | |
| | | PLADKGIGNRIYMQWCSESSSSFEPTKSKCMLQDMPLY | |
| | | MLTYGYLDYVVKCTGVKSAWTDMRVAIRSPYTFPQLIG | |
| | | STDKVGFIPLGEKFMSGDTDPVKNFIPLKYWYRWYPFA | |
| | | ANQKSVLETIVSCGPFMPRDQEAGSWDITVGYKATFKR | |
| | | GGSPLPPQPIDDPCQKPTHDLPDPDRHPPRIQISDPARL | |
| | | GPETLFHSWDIRRGYINTKAIKRISDYTESNDYFSTGVVS | |
| | | KRPRLETQYHGQHESQEEDAYLLLKQLQEEQETSSSE | |
| | | GEQAPQEKTLQKEKLLKQLQLHKQQQQLLRKGIRHLLG | |
| | | DVLRLRRGVHWDPGL* | |
| AB064603.1 | BAB79342.1 | TAWWWGRWRQRRWGRRRRRPWRVRRRRPRRSFRR | 264 |
| | | RRRGRYVSRRRRRRYYRRRLRRGRRRGRRKRHRPTLI | |
| | | LRQWQPDVVKHCKITGWMPLIICGSGSTQMNFITHMDD | |
| | | TPPMGYTYGGNFVNVTFSLEAIYEQFLYHRNRWSRSNH | |
| | | DLDLARYQGTTLKLYRHATVDYILSYNRTGPFQISEMTY | |
| | | MSTHPAIMLLMKHRIVVPSLRTKPKGRRSIKIRIKPPKLM | |
| | | LNKWYFTKDICSMGLFQLMATGAELTNPWLRDTTKSPV | |
| | | IGFRVLKNSVYTNLSNLKDVSISGERKSILNKIHPETLTG | |
| | | SGNASKGWEYSYTKLMAPIYYSAVRNSTYNWQNYQTH | |
| | | CATTAIKFKEKQTSTLTLIKAEYLYHYPNNVTQVDFIDDP | |
| | | TLTHDFGIYSPYWITPTRISLDWDTPWTYVRYNPLSDKG | |
| | | IGNRIYAQWCSEKSSKLDTTKSKCILKDFPLWCMAYGY | |
| | | CDWVVKCTGVSSAWTDMRVAIICPYTEPALIGSDENVG | |
| | | FIPVSDTFCNGDMPFLAPYIPITWWIKWYPMITHQKEVL | |
| | | EAIVNCGPFVPRDQSSPAWEITMGYKMDWKWGGSPLP | |
| | | SQAIDDPCQKPTHELPDPDRHPRMLQVSDPTKLGPKTV | |
| | | FHKWDWRRGQLSKRSIKRVQEDSTDDEYVTGPLSRKR | |
| | | NKLDTKMPGPPTPEKESYTLLQALQESGQESSSQDEE | |
| | | QAPQKEENQKEALVEQLQLQKQHQRVLKRGLKLLLGD | |
| | | VLRLRRGVHWDPLLS* | |
| AB064604.1 | BAB79346.1 | MAWGWWKRKRRWWWRKRWTRGRLRRRWPRRSRR | 265 |
| | | RPRRRRVRRRRRWRRGRPRRRLYRRGRRYRRKRKRA | |
| | | KITIRQWQPAMTRRCFIRGHMPALICGWGAYASNYTSH | |
| | | LEDKIVKGPYGGGHATFRFSLQVLCEEHLKHHNYWTRS | |
| | | NQDLELALYYGATIKFYRSPDTDFIVTYQRKSPLGGNILT | |
| | | APSLHPAEAMLSKNKILIPSLQTKPKGKKTVKVNIPPPTL | |
| | | FVHKWYFQKDICDLTLFNLNVVAADLRFPFCSPQTDNV | |
| | | CITFQVLAAEYNNFLSTTLGTTNESTFIENFLKVAFPDDK | |
| | | PRHSNILNTFRTEGCMSHPQLQKFKPPNTGPGENKYFF | |
| | | TPDGLWGDPIYIYNNGVQQQTAQQIREKIKKNMENYYA | |
| | | KIVEENTIITKGSKAHCHLTGIFSPPFLNIGRVAREFPGLY | |
| | | TDVVYNPWTDKGKGNKIWLDSLTKSDNIYDPRQSILLMA | |
| | | DMPLYIMLNGYIDWAKKERNNWGLATQYRLLLTCPYTF | |
| | | PRLYVETNPNYGYVPYSESFGAGQMPDKNPYVPITWR | |
| | | GKWYPHILHQEAVINDIVISGPFTPKDTKPVMQLNMKYS | |
| | | FRFTWGGNPISTQIVKDPCTQPTFEIPGGGNIPRRIQVIN | |
| | | PKVLGPSYSFRSFDLRRDMFSGSSLKRVSEQQETSEFL | |
| | | FSGGKRPRIDLPKYVPPEEDFNIQERQQREQRPWTSES | |
| | | ESEAEAQEETQAGSVREQLQQQLQEQFQLRRGLKCLF | |
| | | EQLVRTQQGVHVDPCLV* | |
| AB064606.1 | BA1379354.1 | MAWGWWKRRRRWWFRKRWTRGRLRRRWPRSARRR | 266 |
| | | PRRRRVRRRRRWRRGRPRRRLYRRYRRKKRRRRKPK | |
| | | TVLKQWQPDITKRCYIIGYIPAIICGAGTWSHNYTSHLLDI | |
| | | IPKGPFGGGHSTMRFSLKVLFEEHLRHLNFWTRSNQDL | |
| | | ELVRYFRCSFRFYRDQHTDYLVHYSRKTPLGGNRLTAP | |
| | | SLHPGVQMLSKNKIIVPSYDTKPKGKSYVKVTIAPPTLLT | |
| | | DKWYFSKDICDTTLVNLDVVLCNLRFPFCSPQTDNPCIT | |
| | | FSVLHSIYNDFLSIVDTGNYKTQFVSNLSTKVGTDWGKR | |
| | | LNTFRTEGCYSHPKLPKKAVTPGNDKTYFTVPDGLWGD | |
| | | AVFNAEASNIITKNMESYSESAKARGVQGDPAFCHLTGI | |
| | | YSPPWLTPGRISPETPGLYTDVTYNPYADKGVGNRIWV | |
| | | DYCSKKGNKYDNTSKCLLEDMPLWMVTFGYVDWVKKE | |
| | | TGNWGIPLWARVLIRCPYTVPKLYNEADPNYGWVPYSY | |
| | | YFGEGKMPNGDLYVPFKIRMKWYPSMWNQEPVLNDLA | |
| | | KSGPFAYKDTKTSVTVTAKYKFTFNFGGNPVPSQIVQD | |
| | | PCTQSTYDIPGTGNLPRRIQVIDPKVLGPHYSFHRWDFR | |
| | | RGLFGQQAIKRVSEQPTTSEFLFSGPKRPRIDQGPYIPP | |
| | | EKGSDSLQRESRPWSNSETEAETEAPSEEEPENQEEQ | |
| | | VLQLQLRQQLREQRKLRQGIQCLFEQLITTQQGVHKNP | |
| | | LLE* | |
| DQ186994.1 | ABD34286.1 | MAWSWWWRRRKRWWPRRRRRWRRFRTRRARRAVP | 267 |
| | | RRRRRRRVRRRRWGRRRRRRRVFYKRRRRKTGRLYR | |
| | | KPKKKLVLTQWHPTTVRNCSIRGLVPLVLCGHTQGGRN | |
| | | FALRSDDYPKQGSPYGGSFSTTTWNLRVLFDEHQKHH | |
| | | NTWSYPNNQLDLGRYKGCTFYFYRDKKTDYIVKFQRR | |
| | | GPFKINKYSSPMAHPGMMMLDKMKILVPSFDTRPGGR | |
| | | RRVKVTIRPPTLLEDKWYTQQDLAPVNLVSLVVSAASFI | |
| | | HPFSQPQTNNICTTFQVLKDMYYDCIGINSTLTTKYENLF | |
| | | NKLYSKCCYFETFQTIAQLNPGFKAAKKTTNGSGSTAAT | |
| | | LGDAVTELKNPNGTFYTGNNSTFGCCTYKPTKEIGSNA | |
| | | NKWFWHQLTATDSDTLGQYGRASIKYMEYHTGIYSSIFL | |
| | | SPLRSNLEFPTAYQDVTYNPLTDRGIGNRIWYQYSTKE | |
| | | NTTFNETQCKCVLSDLPLWSMFYGYVDFIESELGISAEI | |
| | | HNFGIVCVQCPYTFPPMFDKSKPDKGYVFYDTLFGNGK | |
| | | MPDGSGHVPTYWQQRWWPRFSFQRQVMHDIILTGPF | |
| | | SYKDDSVMTGITAGYKFKFSWGGDMVSEQVIKNPERG | |
| | | DGRDSTYPDRQRRDLQVVDPRSMGPQWVFHTFDYRR | |
| | | GLFGKDAIKRVSEKPTDPDYFTTPYKKPRFFPPTAGEEK | |
| | | LQEEDSALQEKRSPLSSEEGQTRAQVLQQQVLQSELQ | |
| | | QQQELGEQLRFLLREMFKTQAGIHMNPRAFQEL* | |
| DQ186995.1 | ABD34288.1 | MAWSWWWRRRKRWWPRRRRRWRRFRTRRARRAVP | 268 |
| | | RRRRRRRVRRRRWGRRRRRRRVFYKRRRRKTGRLYR | |
| | | KPKKKLVLTQWHPTTVRNCSIRGLVPLVLCGHTQGGRN | |
| | | FALRSDDYPKQGSPYGGSFSTTTWNLRVLFDEHQKHH | |
| | | NTWSYPNNQLDLGRYKGCTFYFYRDKKTDYIVKFQRR | |
| | | GPFKINKYSSPMAHPGMMMLDKMKILVPSFDTRPGGR | |
| | | RRVKVTIRPPTLLEDKWYTQQDLAPVNLVSLVVSAASFI | |
| | | HPFSQPQTNNICTTFQVLKDMYYDCIGINSTLTTKYENLF | |
| | | NKLYSKCCYFETFQTIAQLNPGFKAAKKTTNGSGSTAAT | |
| | | LGDAVTELKNPNGTFYTGNNSTFGCCTYKPTKEIGSNA | |
| | | NKWFWHQLTATDSDTLGQYGRASIKYMEYHTGIYSSIFL | |
| | | SPLRSNLEFPTAYQDVTYNPLTDRGIGNRIWYQYSTKE | |
| | | NTTFNETQCKCVLSDLPLWSMFYGYVDFIESELGISAEI | |
| | | HNFGIVCVQCPYTFPPMFDKSKPDKGYVFYDTLFGNGK | |
| | | MPDGSGHVPTYWQQRWWPRFSFQRQVMHDIILTGPF | |
| | | SYKDDSVMTGITAGYKFKFSWGGDMVSEQVIKNPERG | |
| | | DGRDSTYPDRQRRDLQVVDPRSMGPQWVFHTFDYRR | |
| | | GLFGKDAIKRVSEKPTDPDYFTTPYKKPRFFPPTAGEEK | |
| | | LQEEDSALQEKRSPLSSEEGQTRAQVLQQQVLQSELQ | |
| | | QQQELGEQLRFLLREMFKTQAGIHMNPRAFQEL* | |
| DQ186996.1 | ABD34290.1 | MAWGWWRWRRRWPARRWRRRRRRRPVRRTRARRP | 269 |
| | | ARRYRRRRTVRTRRRRWGRRRYRRGWRRRTYVRKG | |
| | | RHRKKKKRLILRQWQPATRRRCTITGYLPIVFCGHTKGN | |
| | | KNYALHSDDYTPQGQPFGGALSTTSFSLKVLFDQHQR | |
| | | GLNKWSFPNDQLDLARYRGCKFYFYRTKQTDWIGQYDI | |
| | | SEPYKLDKYSCPNYHPGNMIKAKHKFLIPSYDTNPRGR | |
| | | QKIIVKIPPPDLFVDKWYTQEDLCSVNLVSLAVSAASFLH | |
| | | PFGSPQTDNPCYTFQVLKEFYYQAIGFSATDQQREKVF | |
| | | DILYKNNSYWESNITPFYVINVKKGSNTTQYMSPQISDS | |
| | | SFRKKVNTNYNWYTYDAKTNASQLKQLRNAYFKQLTSE | |
| | | GPQHTYSDNGYASQWTTPSTDAYEYHLGMFSTIFLAPD | |
| | | RPVPRFPCAYQDVTYNPLMDKGVGNHVWFQYNTKADT | |
| | | QLIVTGGSCKAHIQDIPLWAAFYGYSDFIESELGPFVDA | |
| | | DTVGLICVICPYTKPPMYNKTNPMMGYVFYDRNFGDGK | |
| | | WTDGRGKIEPYWQVRWRPEMLFQETVMADIVQTGPFS | |
| | | YKDELKNSTLVCKYKFYFTWGGNMMFQQTIKNPCKTD | |
| | | GQPTDSSRHPRGIQVADPEQMGPRWVFHSFDWRRGY | |
| | | LSEKALKRLQEKPLDYDEYFTQPKRPRIFPPTESAEGEF | |
| | | REPEKGSYSEEERSQASAEEQTEEATVLLLKRRLREQQ | |
| | | QLQQQLQFLTREMFKTQAGLHINPMLLNQR* | |
| DQ186997.1 | ABD34292.1 | MAWGWWRWRRRWPARRWRRRRRRRPVRRTRARRP | 270 |
| | | ARRYRRRRTVRTRRRRWGRRRYRRGWRRRTYVRKG | |
| | | RHRKKKKRLILRQWQPATRRRCTITGYLPIVFCGHTKGN | |
| | | KNYALHSDDYTPQGQPFGGALSTTSFSLKVLFDQHQR | |
| | | GLNKWSFPNDQLDLARYRGCKFYFYRTKQTDWIGQYDI | |
| | | SEPYKLDKYSCPNYHPGNMIKAKHKFLIPSYDTNPRGR | |
| | | QKIIVKIPPPDLFVDKWYTQEDLCSVNLVSLAVSAASFLH | |
| | | PFGSPQTDNPCYTFQVLKEFYYQAIGFSATDEQREKVF | |
| | | DILYKNNSYWESNITPFYVINVKKGCNTTQYMSPQISDS | |
| | | SFRKKVNTNYNWYTYDAKTNASQLKQLRNAYFKQLTSE | |
| | | GPQHTYSDNGYASQWTTPSTDAYEYHLGMFSTIFLAPD | |
| | | RPVPRFPCAYQDVTYNPLMDKGVGNHVWFQYNTKADT | |
| | | QLIVTGGSCKAHIQDIPLWAAFYGYSDFIESELGPFVDA | |
| | | DTVGLICVICPYTKPPMYNKTNPMMGYVFYDRNFGDGK | |
| | | WTDGRGKIEPYWQVRWRPEMLFQETVMADIVQTGPFS | |
| | | YKDELKNSTLVCKYKFYFTWGGNMMFQQTIKNPCKTD | |
| | | GQPTDSSRHPRGIQVADPEQMGPRWVFHSFDWRRGY | |
| | | LSEKALKRLQEKPLDYDQYFTQPKRPRIFPPTESAEGEF | |
| | | REPEKGSYSEEERLQASAEEQTEEATVLLLKRRLREQQ | |
| | | QLQQQLQFLTREMFKTQAGLHINPMLLNQR* | |
| DQ186998.1 | ABD34294.1 | MAWGWWRWRRRWPARRWRRRRRRRPVRRTRARRP | 271 |
| | | ARRYRRRRTVRTRRRRWGRRRYRRGWRRRTYVRKG | |
| | | RHRKKKKRLILRQWQPATRRRCTITGYLPIVFCGHTKGN | |
| | | KNYALHSDDYTPQGQPFGGALSTTSFSLKVLFDQHQR | |
| | | GLNKWSFPNDQLDLARYRGCKFYFYRTKQTDWIGQYDI | |
| | | SEPYKLDKYSCPNYHPGNMIKAKHKFLIPSYDTNPRGR | |
| | | QKIIVKIPPPDLFVDKWYTQEDLCSVNLVSLAVSAASFLH | |
| | | PFGSPQTDNPCYTFQVLKEFYYQAIGFSATDEQREKVF | |
| | | DILYKNNSYWESNITPFYVINVKKGCNTTQCMSPQISDS | |
| | | SFRKKVNTNYNWYTYDAKTNASQLKQLRNAYFKQLTSE | |
| | | GPQHTYSDNGYASQWTTPSTDAYEYHLGMFSTIFLAPD | |
| | | RPVPRFPCAYQDVTYNPLMDKGVGNHVWFQYNTKADT | |
| | | QLIVTGGSCKAHIQDIPLWAAFYGYSDFIESELGPFVDA | |
| | | DTVGLICVICPYTKPPMYNKTNPMMGYVFYDRNFGDGK | |
| | | WTDGRGKIEPYWQVRWRPEMLFQETVMADIVQTGPFS | |
| | | YKDELKNSTLVCKYKFYFTWGGNMMFQQTIKNPCKTD | |
| | | GQPTDSSRHPRGIQVADPEQMGPRWVFHSFDWRRGY | |
| | | LSEKALKRLQEKPLDYDQYFTQPKRPRIFPPTESAEGEF | |
| | | REPEKGSYSEEERSQASAEERTEEATVLLLKRRLREQQ | |
| | | QLQQQLQFLTREMFKTQAGLHINPMLLNQR* | |
| DQ186999.1 | ABD34296.1 | MAWRWWKRRRRWWFRKRWTRGRLRRRWPRPARRR | 272 |
| | | PRRRRVRRRRRWRRGRPRRRLYRRYRRKKRRRRKPK | |
| | | IILKQWQPDIVKRCYIVGYIPAIICGAGTWSHNYTSHLLDII | |
| | | PKGPFGGGHSTMRFSLKVLSEEHLRHLNFWTKSNQDL | |
| | | ELIRYFRCSFKFYRDQDTDYIVHYSRKTPLGGNRLTAPN | |
| | | LHPGVQMLSKNKIIVPSYATKPKGPSYIKVTIAPPTLLTD | |
| | | KWYFSKDVCDTTLVNLDVVLCNLRFPFCSPQTDNPCITF | |
| | | QVLHSIYNDFLSIVDTNNYKESFVSALPTKVSTDWGKRL | |
| | | NTFRTEGCYSHPKLHKKAVTAATDTEYFTKPDGLWGDT | |
| | | IFDVENGQKIIKNMESYAKSAKERGINGDPAFCHLTGIYS | |
| | | PPWLTPGRISPETPGLYTDVTYNPYADKGVGNRIWVDY | |
| | | CSKKGNKYDNTSKCLLEDMPLWMVCFGYVDCVKKETG | |
| | | NWGIPLWARVLIRSPYTVPKLYNEADPNYGWVPIFYYF | |
| | | GEGKMPNGDMYIPFKIRMKWYPSMWNQEPVLNDLAKS | |
| | | GPFAYKNTKTSVTVTAKYKFTFNFGGNPVPSQIVQDPC | |
| | | TQPTYDIPGTGNLPRRIQVIDPKVLSPHYSFHRWDFRRG | |
| | | LFGSQAIKRVSEQSTTSEFLFSGPKKPRIDQGPYIPPEK | |
| | | GSGSLQREPRPWSSSETEAETEAPSEEEPENQEEQVL | |
| | | QLQLRQQLREQRKLRQGIQCLFEQLITTQQGVHKNPLL | |
| | | E* | |
| DQ187000.1 | ABD34298.1 | MAWRWWKRRRRWWFRKRWTRGRLRRRWPRPARRR | 273 |
| | | PRRRRVRRRRRWRRGRPRRRLYRRYRRKKHRRRKPK | |
| | | IILKQWQPDIVKRCYIVGYIPAIICGAGTWSHNYTSHLLDII | |
| | | PKGPFGGGHSTMRFSLKVLFEEHLRHLNFWTKSNQDL | |
| | | ELIRYFRCSFKFYRDQDTDYIVHYSRKTPLGGNRLTAPN | |
| | | LHPGVQMLSKNKIMVPSYATKPKGPSYIKVTIAPPTLLTD | |
| | | KWYFSKDVCDTTLVNLDVVLCNLRFPFCSPQTDNPCITF | |
| | | QVLHSIYNDFLSIVDTNNYKESFVSALPTKVSTDWGKRL | |
| | | NTFRTEGCYSHPKLHKKAVTAATDTEYFTKPDGLWGDT | |
| | | IFDVENGQKIIKNMESYAKSAKERGINGDPAFCHLTGIYS | |
| | | PPWLTPGRISPETPGLYTDVTYNPYADKGVGNRIWVDY | |
| | | CSKKGNKYDNTSKCLLEDMPLWMVCFGYVDWVKKET | |
| | | GNWGIPLWARVLIRSPYTVPKLYNEADPNYGWVPISYY | |
| | | FGEGKMPNGDMYIPFKIRMKWYPSMWNQEPVLNDLAK | |
| | | SGPFAYKNTKTSVTVTAKYKFTFNFGGNPVPSQIVQDP | |
| | | CTQPTYDIPGTGNLPRRIQVIDPKVLGPHYSFHRWDFR | |
| | | RGLFGSQAIKRVSEQSTTSEFLFSGPKKPRIDQGPYIPP | |
| | | EKGSGSLQREPRPWSSSETEAETEAPSEEEPENQEEQ | |
| | | VLQLQLRQQLREQRKLRQGIQCLFEQLITTQQGVHKNP | |
| | | LLE* | |
| DQ187001.1 | ABD34300.1 | MARRWWKRRRRWWFRKRWTRGRLRRRWPRPARRR | 274 |
| | | PKRRRVRRRRRWRRGRPRRRLYRRYRRKKRRRRKPKI | |
| | | ILKQWQPDIVKRCYIVDYIPAIICGAGMVSRNYTSHLLDII | |
| | | PKGPFGGGHSTMRFSLKVLFEEHLRHLNFWTKSNQDL | |
| | | ELIRYFRCSFKFYRDQDTDHIVHYSRKTPLGGNRLTAPN | |
| | | LHPGVQMLSKNKIIVPSYATKPKGPSYIKVTIAPPTLLTD | |
| | | KWYFSKDVCDTTLVNLDVVLCNLRFPFCSPQTDNPCITF | |
| | | QVLHSIYNDFLSIVDTNNYKESFVAALPTKVSTDWGKRL | |
| | | NTFRTEGCYSHPKLHKKAVTAATDTEYFTKPDGLWGDT | |
| | | IFDVENGQKIIKNMESYAKSAKERGINGDPAFCHLTGIYS | |
| | | PPWLTPGRISPETPGLYTDVTYNPYADKGVGNRIWVDY | |
| | | CSKKGNKYGNTSKCLLEDMPLWMVCFGYVDWVKKET | |
| | | GNWGIPLWARVLIRSPYTVPKLYNEADPNYGWVPISYY | |
| | | FGEGKMPNGDMYVPFKIRMKWYPSMWNQEPVLNDLA | |
| | | KSGPFAYKNTKTSVTVTAKYKFTFNFGGNPVPSQIVQD | |
| | | PCTQPTYDIPGTGNLPRRIQVIDPKVLGPHYSFHRWDFR | |
| | | RGLFGSQAIKRVSEQSTTSEFLFSGPKKPRIDQGPYIPP | |
| | | EKGSGSLQREPRPWSSSETEAETEAPSEEEPENQEEQ | |
| | | VLQLQLRQQLREQRKLRQGIQCLFEQLITTQQGVHKNP | |
| | | LLE* | |
| DQ187002.1 | ABD34302.1 | MAWRWWKRRRRWWFRKRWTRGRLRRRWPRPARRR | 275 |
| | | PKRRRVRRRRRWRRERPRRRLYRRYRRKKRRRRKPKI | |
| | | ILKQWQPDIVKRCYIVGYIPAIICGAGMVSHNYTSHLLDII | |
| | | PKGPFGGGHSTMRFSLKVLFEEHLRHLNFWTKSNQDL | |
| | | ELIRYFRCSFKFYRDQDTDYIVHYSRKTPLGGNRLTAPN | |
| | | LHPGVQMLSKNKIIVPSYATKPKGPSYIKVTIAPPTLLTD | |
| | | KWYFSKDVCDTTLVNLDVVLCKLRFPFCSPQTDNPCITF | |
| | | QVLHSIYNDFLSIVDTNNYKESFVAALPTKVSTDWGKRL | |
| | | NTFRTEGCYSHPKLHKKAVTAATDTEYFTKPDGLWGDT | |
| | | IFDVENGQKIIKNMESYAKSAKERGINGDPAFCHLTGIYS | |
| | | PPWLTPGRISPETPGLYTDVTYNPYADKGVGDRIWVDY | |
| | | CSKKGNKYDNTSKCLLEDMPLWMVCFGYVDWVKKET | |
| | | GNWGIPLWARVLIRSPYTVPKLYNEADPNYGWVPISYY | |
| | | FGEGKMPNGDMYVPFKIRMKWYPSMWNQEPVLNDLA | |
| | | KSGPFAYKNTKTSVTVTAKYKFTFNFGGNPVPSQIVQN | |
| | | PCTQPTYDIPGTGNLPRRTQVIDPKVLGPHYSFHRWDF | |
| | | RRGLFGSQAIKRVSEQSTTSEFLFSGPKKPRIDQGPYIP | |
| | | PEKGSGSLQREPRPWSSSETEAETEAPSEEEPENQEE | |
| | | QVLQLQLRQQLREQRKLRQGIQCLFEQLITTQQGVHKN | |
| | | PLLE* | |
| DQ187004.1 | ABD34305.1 | MAWGWWKRRRRRWWRGLWRRRRFARRRPRRPARR | 276 |
| | | PRRRRVRRRRRWRRGRLRRRVYNRRRRIRRKRRRQK | |
| | | LTIRQWQPDKRRICRIKGYLPAIIYGDGTFSKNYTSHLED | |
| | | RISKGPFGGGHGTARMSLKVLYDDHLKGLNIWTYSNKD | |
| | | LELVRYMHTTITFYRHPDTDFIAVYNRKTPLGGNRYTAP | |
| | | SLHPGNMMLQRTKILIPSFKTKPRGSGKIRVVIKPPTLLV | |
| | | DKWYFQKDICDVTLFNLNITAASLRFPFCSPQTNNPCVT | |
| | | FQVLHSVYDKALGINTFGTKETPEDQQMEDIKNWLTKAL | |
| | | NTAGFTVLNTFRTEGIYSHPQLKKPPEGSNKPSAEQYF | |
| | | APLDSLWGDKIYVNNNTSPSQTEATIPGILARNACTYYQ | |
| | | KAKTSTLRQHLGAMAHCHLTGIFNPALLTQGRLSPEFFG | |
| | | LYKEIIYNPYDDKGKGNRIWIDPLTKPDNIFDARSKVELE | |
| | | DMPLWMACFGYNDWCKKELNNWGLEVEYRVLLRCPY | |
| | | TYPKLYNDANPNYGYVPISYNFSAGKTVEGDLYVPIMW | |
| | | RTKWHPTMYNQSPVLEDLAMAGPFAPKEKIPSSTLTIKY | |
| | | KAKFIFGGNPISEQIVKDPCTQPTYEIPGGGTLPRRIQVI | |
| | | NPEYIGPHYSFKSFDIRRGYFSAKSVKRVSEQSDITEFIF | |
| | | SGPKKPRIDQDRYQEAEEHSDSRLREEKPWESSQETE | |
| | | SEAQEEEIQETNIQLQLQHQLKEQLQLRRGIQCLFEQLT | |
| | | KTQQGVHINPSLV* | |
| DQ187005.1 | AD34307.1 | MSLKVLYDDHLKGLNIWTYSNKDLELVRYMHTTITFYRH | 277 |
| | | PDTDFIAVYNRKTPLGGNRYTAPSLHPGNMMLQRTKILI | |
| | | PSFKTKPRGSGKIRVVIKPPTLLVDKWYFQKDICDVTLF | |
| | | NLNITAASLRFPFCSPQTNNPCVTFQVLHSVYDKALGIN | |
| | | TFGTKETPEDQQMEDIKNWLTKALNTAGFTVLNTFRTE | |
| | | GIYSHPQLKKPPEGSNKPSAEQYFAPLDSLWGDKIYVN | |
| | | NNTSPSQTEATIPGILARNACTYYQKAKTSTLRQHLGAM | |
| | | AHCHLTGIFNPALLTQGRLSPEFFGLYKEIIYNPYDDKGK | |
| | | GNRIWIDPLTKPDNIFDARSKVELEDMPLWMACFGYND | |
| | | WCKKELNNWGLEVEYRVLLRCPYTYPKLYNDANPNYG | |
| | | YVPISYNFSAGKTVEGDLYVPIMWRTKWYPTMYDQSPV | |
| | | LEDLAMAGPFAPKEKIPSSTLTIKYKAKFIFGAILYLNRLS | |
| | | RTPAPSPPTKFPEAVRSLAEYKSLTRNTSGHTTHSKAS | |
| | | TSDVGTLARRVLKECQNNQTLLSLYSQVQKSQGSTKTG | |
| | | TKKQKNTQILDSEKRNRGRARKKQRAKPKKKRYKRQTS | |
| | | SSSCSTSSKSNCSSDGESSASSSN* | |
| DQ361268.1 | ABD61942.1 | MAWRWWWRRRRPWRWRWRRRRRPARRRRRRRPA | 278 |
| | | RRARRPRVRRWRRRRVWAPRPYIRRRRRSFRRKKIKIT | |
| | | QWNPAVTKKCTVTGYLPVIYCGTGDIGTTFQNFGSHMN | |
| | | EYKQYNAAGGGFSTMLFTMQNLYEEYQKHRCRWSKS | |
| | | NQDLDLCRYLDCKLTFYRSPNTDFIVGYNRKPPFIDTQIT | |
| | | RCTLHPGMLIQERKKVIIPSFQTRPKGRIKRKIKVRPPTL | |
| | | FTDKWYFQRDLCKVPLVTVSASAASLRFPFGSPQTENY | |
| | | CIYFQVLDPWYHTRLSITGGKPAEYWTQLKAYLTQGWG | |
| | | RSTNNAGYQHGPLGTYFNTLKTSEHIRQPPADNYKQAN | |
| | | KDTTYYGRVDSHWGDHVYQQTIIQAMEENQSNMYTKR | |
| | | ALHTFLGSQYLNFKSGLFSSIFLDNARLSPDFKGMYQEV | |
| | | VYNPFNDRGVGNKVWVQWCTNEDTIFKDLPGRVPVVD | |
| | | LPLWCALMGYSDYCKKYFHDDGFLKEARITIISPYTNPP | |
| | | LINNKNTNEGFVPYSFYFGKGRMPDGNGYIPIDFRFNW | |
| | | YPCIFHQTNWINDMVQCGPFAYHGDEKNCSLTMKYKFK | |
| | | FLFGGNPISQQTIKDPCQQPDWQLPGSGRFPRDVQVS | |
| | | NPRLQTEGSTFHAWDFRRGFYGKRAIERLQGQQDDVT | |
| | | YIAGPPKRPRFEVPALAAEGSSNTRRSELPWQTSEEES | |
| | | SQEENSEETEEETSLSQQLKQQCIEQKLLKRTLHQLVK | |
| | | QLVKTQYHLHAPIIH* | |
| EF538879.1 | ABU55887.1 | MAWRWWKRRRRWWFRKRWTRGRLRRRWPRPARRR | 279 |
| | | PRRRRVRRRRRWRRGRPRRRLYRRYRRKKRRRRKPK | |
| | | IILKQWQPDIVKRCYIIGYIPAIICGAGTWSHNYTSHLLDII | |
| | | PKGPFGGGHSTMRFSLKVLFEEHLRHLNFWTKSNQDL | |
| | | ELIRYFRCSFKFYRDQDTDYIVHYSRKTPLGGNRLTAPS | |
| | | LHPGVQMLSKNKILVPSYATKPKGGSYVKVTIAPPTLLT | |
| | | DKWYFSKDVCDTTLVNLDVVLCNLRFPFCSPQTDNPCI | |
| | | TFQVLHSYYNDYLSIVDTALYKTSFVNNLSTKLGTTWAN | |
| | | RLNTFRTEGCYSHPKLLKKTVTAANDTKYFTTPDGLWG | |
| | | DAVFDVSDAKKLTKNMESYAASANERGVQGDPAFCHL | |
| | | TGIFSPPWLTPGRISPETPGLYTDVTYNPYADKGVGNRI | |
| | | WVDYCSKKGNKYDNTSKCVLEDMPLWMLCFGYVDWV | |
| | | KKETGNWGIPLWARVLIRSPYTVPKLYHENDPDYGWVP | |
| | | ISYYFGEGKMPNGDMYVPFKVRMKWYPSMWNQEPVL | |
| | | NDLAKSGPFAYKNTKTSVTVTAKYKFTFNFGGNPVPSQI | |
| | | VQDPCTQPTYDIPGTGNLPRRIQVIDPKVLGPHYSFHR | |
| | | WDFRRGLFGTQAIKRVSEQSTTSEFLFSGPKKPRIDQG | |
| | | PYIPPEKGSGSLQRESRPWSSSETEAETEAPSEEEPEN | |
| | | QEEQVLQLQLRQQLREQRKLRQGIQCLFEQLITTQQGV | |
| | | HKNPLLE* | |
| EU305675.1 | ABY26045.1 | MAWWGRWRRWRWRPRRWRRRRRRRVPRRRAQRSV | 280 |
| | | RRRRARRVRRRRWGRRRWRRGYRRRLRLRRKRKRK | |
| | | RRLVLTQWHPAKVRRCRISGVLPMILCGAGRSSFNYGL | |
| | | HSDDFTKQKPNNQNPHGGGMSTVTFNLKVLFDQYERF | |
| | | MNKWSYPNDQLDLARYKGCKFTFYRHPEVDFLAQYDN | |
| | | VPPMKMDELTAPNTHPALLLQSRHRVKIYSWKTRPFGS | |
| | | KKVTVKIGPPKLFEDKWYSQSDLCKVSLVSWRLTACDF | |
| | | RFPFCSPQTDNPCVTFQVLGEQYYEVFGTSVLDVPASY | |
| | | NSQITTFEQWLYKKCTHYQTFATDTRLAPQKKATTSTN | |
| | | HTYNPSGNTESSTWTQSNYSKFKPGNTDSNYGYCSYK | |
| | | VDGETFKAIKNYRKQRFKWLTEYTGENHINSTFAKGKY | |
| | | DEYEYHLGWYSNIFIGNLRHNLAFRSAYIDVTYNPTVDK | |
| | | GKGNIVWFQYLTKPTTQLIRTQAKCVIEDLPLYCAFFGY | |
| | | EDYIQRTLGPYQDIETVGVICFISPYTEPPCIRKEEQKKD | |
| | | WGFVFYDTNFGNGKTPEGIGQVHPYWMQRWRVMAQF | |
| | | QKETQNRIARSGPFSYRDDIPSATLTANYKFYFNWGGD | |
| | | SIFPQIIKNPCPDTGLRPSGHREPRSVQVVSPLTMGPEFI | |
| | | FHRWDWRRGFYNPKALKRMLEKSDNDAESSTGPKVP | |
| | | RWFPAHHDQEQESDFDSQETRSQSSQEEAAQEALQD | |
| | | VQETSVQQYLLKQFREQRLLGQQLRLLMLQLTKTQSNL | |
| | | HINPRVLDHA* | |
| EU305676.1 | ABY26046.1 | MFWWGWRRRWWWKPRRRWRRRRARRPRRVPRRRY | 281 |
| | | RRAARRYRGRRVRRRRAGGWRGRRRYSRHYSRRLTV | |
| | | RRKKKKLTLKIWQPQNIRKCRIRGLLPLLICGHTRSAFNY | |
| | | AIHSDDKTPQQESFGGGLSTVSFSLKVLFDQNQRGLNR | |
| | | WSASNDQLDLARYLGCTFWFYRDKKTDFIVQYDISAPF | |
| | | KLDKNSSPSYHPFMLMKAKHKVLIPSFDTKPKGREKIKV | |
| | | RIQPPKMFIDKWYTQEDLCPVILVSLAVSVASFTHPFCS | |
| | | PQTANPCITFQVLKEFYYPAMGYGAPETTVTSVFNTLYT | |
| | | TATYWQSHLTPQFVRMPTKNPDNTENNQAQAFNTWVD | |
| | | KDFKTGKLVKYNFPQYAPSIEKLKQLRTYYFEWETKHT | |
| | | GVAAPPTWTTPTSDRYEYHMGMFSPTFLTPFRSAGLDF | |
| | | PGAYQDVTYNPLTDKGVGNRMWFQYNTKIDTQFDARS | |
| | | CKCVLEDMPLYAMAYGYADFLEQEIGEYQDLEANGYVC | |
| | | VISPYTKPPMFNKHNPQQGYVFYDSQWGNGKWIDGTG | |
| | | FVPVYWLTRWRVELLFQKKVLSDIAMSGPFSYPDELKN | |
| | | TVLTAKYRFDFKWGGNLFHQQTIRNPCKPEETSTGRVP | |
| | | RDVQVVDPVTMGPRFVFHSWDWRRGFLSDRALKRMF | |
| | | EKPLDLEGFAASPKRPRIFPPTEGQLAREQKEQEESSD | |
| | | SQEESSLTSLEEVPEETKLRLHLRKQLREQRSIRQQLRT | |
| | | MFQQLVKTQAGLHLNPLLSSQL* | |
| FJ426280.1 | ACK44071.1 | MAWRWWWQRRWRRRPWPRRRWRRLRRRRPRRPVR | 282 |
| | | RRRRRATVRRRRWRGRRGRRTYTRRAVRRRRRPRKR | |
| | | FVLTQWSPQTARNCSIRGIVPMVICGHTRAGRNYALHS | |
| | | EDFTTQIRPFGGSFSTTTWSLKVLWDEHQKFQNRWSY | |
| | | PNTQLDLARYRGVTFWFYRDQKTDYIVQWSRNPPFKL | |
| | | NKYSSPMYHPGMMMQAKKKLVVPSFQTRPKGKKRYR | |
| | | VRIRPPNMFNDKWYTQEDLCPVPLVQIVVSAATQTKKN | |
| | | CSPQTNNPCITFQVLKDKYLNYIGVNSSETRRNSYKTLQ | |
| | | EKLYSQCTYFQTTQVLAQLSPAFQPAKKPNRTNNSTST | |
| | | TLGNKVTDLKSNNGKFHTGNNPVFGMCSYKPSKDILYK | |
| | | ANEWLWDNLMVENDLHSTYGKATLKCMEYHTGIYSSIF | |
| | | LSPQRSLEFPAAYQDVTYNPNCDRAIGNRVWFQYGTK | |
| | | MNTNFNEQQCKCVLTNIPLWAAFNGYPDFIEQELGISTE | |
| | | VHNFGIVCFQCPYTFPPLYDKKNPDKGYVFYDTTFGNG | |
| | | KMPDGSGHIPIYWQQRWWIRLAFQVQVMHDFVLTGPF | |
| | | SYKDDLANTTLTARYKFRFKWGGNIIPEQIIKNPCKREQ | |
| | | SLGSYPDRQRRDLQVVDPSTMGPIYTFHTWDWRRGLF | |
| | | GADAIQRVSQKPEDALRFTNPFKRPRYLPPTDGEDYRQ | |
| | | EEDFALQERRRRTSTEEVQDEESPPQNAPLLQQQQQQ | |
| | | RELSVQHAEQQRLGVQLRYILQEVLKTQAGLHLNPLLL | |
| | | GPPQTRCISLSPPEAYSP* | |
| FJ392105.1 | ACR20257.1 | MAAWWWGRRRRWRRWRRRRLPRRRRWRRRRRWP | 283 |
| | | RRRRRRWPRRRRRRRPARRPRRRRRRRRVRRPRRR | |
| | | QKLVLTQWNPQTVRKCIIRGFVPLFQCSRTAYHRNFVD | |
| | | HMDDVYTTGPFGGGTGSMLFTLSFFYHEFKKHHCKWS | |
| | | ASNRDFDLCRYRGTVLKFYRHPDVDYIVWLNRNPPFQE | |
| | | NLLDAMSRQPLIMLQTHKCILVRSFKTHPRGPSYVRMK | |
| | | VRPPRLLTDKWYFQSDFCNVPLFQLQFALAELRFPIGSP | |
| | | QTNTTCVNFLVLDNRYHLFLDNKPQQSDNSQREERGH | |
| | | GYPFNGSEGEADRLKFWHSLWNTGRFLNTTHINTLQPN | |
| | | ISKLQEHKAEDTEAKTTYKSLINGNKKVYNDSQYMQNV | |
| | | WAQNKINTLYEAIAEEQYRKIQKYYNTTYGQYQRQLFTG | |
| | | KKYWDYRVGMFSPTFLSPSRLNPEMPGAYTEIAYNPW | |
| | | TDEGTGNVVCLQYLTKETSDYKPHAGSKFTIEDVPLWIA | |
| | | MNGYVDICKKEGKDPGIRLNCLMCIRCPYTRPKLYNPR | |
| | | YPKELFVVYSYNFAHGRMPGGDKYIPMEFKDRWYPSL | |
| | | MHQEEVIEDIVRSGPFALKDQTEMVTCMMRYSALFNW | |
| | | GGNIIREQAVEDPCKKNTFALPGASGVARLLQVSNPIRQ | |
| | | TPSTIVVHSWDWRRSLFTQTGIKRMREQQPYDEITYAG | |
| | | PKRPKLTVPAGPTLAAGDAYNYWERKPLTSPGETLPTQ | |
| | | TETETEAPEEEAQQEEVQEGLQLQQLWEQQLQQKRQL | |
| | | GVMFQQLLRLRTGAEIHPALA* | |
| FJ392107.1 | ACR20260.1 | MAAWWWGRRRRWRRWRRRRLPRRRRWRRRRRWP | 284 |
| | | RRRRRRWPRRRRRRRPARRPRRRRRRRRVRRPRRR | |
| | | QKLVLTQWNPQTVRKCIIRGFVPLFQCSRTACHRNFVD | |
| | | HMDDVYTTGPFGGGTGSMLFTLSFFYHEFKKHHCKWS | |
| | | ASNRDFDLCRYRGTVLKFYRHPDVDYIVWLNRNPPFQE | |
| | | NLLDAMSRQPLIMLQTHKCILVRSFKTHPRGPSYVRMK | |
| | | VRPPRLLTDKWYFQSDFCNVPLFQLQFALAELRFPIGSP | |
| | | QTNTTCVNFLVLDNRYHLFLDNKPQQSENLQRKERGH | |
| | | GYSFTGNEGEVDRLKFWHSLWNTGRFLNTTHINTLLPNI | |
| | | SKLQEHKAEDRQANAKYKNLINGNKKVYNDSQYMQNV | |
| | | WEENKINTLYDAIAEEQYRKIQKYYNTTYGQYQRQLFTG | |
| | | KKYWDYRVGMFSPTFLSPSRLNPEMPGAYTEIAYNPW | |
| | | TDEGTGNVVCLQYLTKETSDYKPHAGSKFTIEDVPLWIA | |
| | | MNGYVDICKKEGKDPGIRLNCLMCIRCPYTRPKLYNPR | |
| | | YPEELFVVYSYNFAHGRMPGGDKYIPMEFKDRWYPSL | |
| | | MHQEEVIEDIVRSGPFALKDQTEMVTCMMRYSALFNW | |
| | | GGNIIREQAVEDPCKKNTFALPGASGVARLLQVSNPIRQ | |
| | | TPSTIVVHSWDWRRSLFTQTGIKRMREQQPYDEITYAG | |
| | | PKRPKLTVPAGPTLAAGDAYNYWERKPLTSPGETLPTQ | |
| | | TDTETEAPEEEAQQEEVQEGLQLQQLWEQQLQQKRQL | |
| | | GVMFQQLLRLRTGAEIHPALA* | |
| FJ392108.1 | ACR20262.1 | MAAWWWGRRRRWRRWRRRRLPRRRRWRRRRRWP | 285 |
| | | RRRRRRWPRRRRRRRPARRPRRRRRRRRVRRPRRR | |
| | | QKLVLTQWNPQTVRKCIIRGFVPLFQCSRTAYHRNFVD | |
| | | HMDDVYTTGPFGGGTGSMLFTLSFFYHEFKKHHCKWS | |
| | | ASNRDFDLCRYRGTVLKFYRHPDVDYIVWLNRNPPFQE | |
| | | DLLDAMSRQPLIMLQTHKCILVRSFKTHPRGPSYVRMK | |
| | | VRPPRLLTDKWYFQSDFCNVPLFQLQFALAELRFPIGSP | |
| | | QTNTTCVNFLVLDNRYHLFLDNKPQQSDNPQRKERGH | |
| | | GYSFTGNEGEMDRERFWHSLWSTGRFLNTTHINTLLPN | |
| | | ISKLQDHKAEDKDAKTTYKSLINDNKKVYNDSQYMQNV | |
| | | WDQNKIHTLYMAIAEEQYRKIQKYYNTTYGQYQRQLFT | |
| | | GKKYWDYRVGMFSPTFLSPSRLNPEMPGAYTEIAYNP | |
| | | WTDEGTGNVVCLQYLTKETSDYKPHAGSKFTIEDVPLW | |
| | | IAMNGYVDICKKEGKDPGIRLNCLMCIRCPYTRPKLYNP | |
| | | RYPEELFVVYSYNFAHGRMPGGDKYIPMEFKDRWYPS | |
| | | LMHQEEVIEDIVRSSPFALKDQTEMVTCMMRYSALFNW | |
| | | GGNIIREQAVEDPCKKNTFALPGASGVARLLQVSNPIRQ | |
| | | TPSTIVVHSWDWRRSLFTQTGIKRMREQQPYDEITYAG | |
| | | PKRPKLTVPAGPTLAAGDAYNYWERKPLTSPGETLPTQ | |
| | | TETETEAPEEEAQQEEVQEGLQLQQLWEQQLQQKRQL | |
| | | GVMFQQLLRLRTGAEIHPALA* | |
| FJ392111.1 | ACR20267.1 | MAAWWWGRRRRWRRWRRRRLPRRRRWRRRRRWP | 286 |
| | | RRRRRRWPRRRRRRRPARRPRRRRRRRRVRRPRRR | |
| | | QKLVLTQWNPQTVRKCIIRGFVPLFQCSRTAYHRNFVD | |
| | | HMDDVYTTGPFGGGAGSMLFTLSFFYHEFKKHHCKWS | |
| | | ASNRDFDLSRYRGAVLKFYRHPDVDYIVWLNRNPPFQE | |
| | | NLLDAMSRQPLIMLQTHKCILVRSFKTHPRGPSYVRMK | |
| | | VRPPRLLTDKWYFQSDFCNVPLFQLQFALAELRFPIGSP | |
| | | QTNTTCVNFLVLDNRYHSFLDNKPQQSENSQRKERGH | |
| | | GYSFTGKEGEQDRLTFWQSLWNTGRFLNTTHINTLLPN | |
| | | ISKLQDHKAEDTDANPDYKSLINGNKKVYNDSQYMQNV | |
| | | WQQGKINTLCNAIAQEQYRKIQKYYNTTYGQYQRQLFT | |
| | | GKKYWDYRVGTFSPTFLSPSRLNPEMPGAYTEIAYNPW | |
| | | TDEGTGNVVCLQYLTKETSDYKPHAGSKFTIEDVPLWIA | |
| | | MNGYVDICKKEGKDPGIRLNCLMCIRCPYTRPKLYNPR | |
| | | YPEELFVVYSYNFSHGRMPGGDKYIPMEFKDRWYPSL | |
| | | MHQEEVIEDIVRSGPFALKDQTDMVTCMMRYSALFNW | |
| | | GGNIIREQAVEDPCKKNTFALPGASGVARLLQVSNPIRQ | |
| | | TPSTWHSWDWRRSLFTQTGIKRMREQQPYDEITYAG | |
| | | PKRPKLTVPAGPTLAAGDAYNYWERKPLTSPGETLPTQ | |
| | | TETETEAPEEEAQQEEVQEGLQLQQLWEQQLQQKRQL | |
| | | GVMFQQLLRLRTGAEIHPALA* | |
| FJ392112.1 | ACR20269.1 | MAAWWWGRRRRWRRWRRRRLPRRRRWRRRRRWP | 287 |
| | | RRRRRRWPRRRRRRRPARRPRRRRRRRRVRRPRRR | |
| | | QKLVLTQWNPQTVRKCIIRGFVPLFQCSRTAYHRNFVD | |
| | | HMDDVYTTGPFGGGTGSMLFTLSFFYHEFKKHHCKWS | |
| | | ASNRDFDLCRYRGTVLKFYRHPDVDYIVWLNRNPPFQE | |
| | | NLLDAMSRQPLIMLQTHKCILVRSFKTHPRGPSYVRMK | |
| | | VRPPRLLTDKWYFQSDFCNVPLFQLQFALAELRFPIGSP | |
| | | QTNTTCVNFLVLDNRYHLFLDNKPRQSENLQRKERGH | |
| | | GYVFTGNEGEDDRLKFWHSLWSTGRFLNTTHINTLLPNI | |
| | | SKLQDHEAEDTQAKTDYKSLINGNKKVYNDSQYMQDV | |
| | | WEQKKIQTLYKVIAEEQYRKIEKYYNTTYGQYQRQLFTG | |
| | | KKYWDYRVGMFSPTFLSPSRLNPEMPGAYTEIAYNPW | |
| | | TDEGTGNVVCLQYLTKETSDYKPHAGSKFTIEDVPLWIA | |
| | | MNGYVDICKKEGKDPGIRLNCLMCIRCPYTRPKLYNPR | |
| | | YPEELFVVYSYNFAHGRMPGGDKYIPMEFKDRWYPSL | |
| | | MHQEEVIEDIVRSGPFALKDQTEMVTCMMRYSALFNW | |
| | | GGNIIREQAVEDPCKKNTFALPGASGVARLLQVSNPIRQ | |
| | | TPSTTWHSWDWRRSLFTQTGIKRMREQQPYDEITYAG | |
| | | PKRPKLTVPAGPTLAAGDAYNYWERKPLTSPGETLPTQ | |
| | | TETETEAPEEEAQQEEVQEGLQLQQLWEQQLQQKRQL | |
| | | GVMFQQLLRLRTGAEIHPALA* | |
| FJ392114.1 | ACR20272.1 | MAAWWWGRRRRWRRWRRRRLPRRRRWRRRRRWP | 288 |
| | | RRRRRRWPRRRRRRGPARRLRRRRRRRRVRRPRRR | |
| | | QKLVLTQWNPQTQRKCVVRGFLPLFFCGQGAYHRNFV | |
| | | EHMDDVFPKGPSGGGFGSMVWNLDFLYQEFKKHHNK | |
| | | WSSSNRDFDLVRCHGTVIKFYRHSDFDYLVHVTRTPPF | |
| | | KEDLLTIVSHQPGLMMQNYRCILVKSYKTHPGGRPYITP | |
| | | KIRPPRLLTDKWYFRPDFCGVPLFKLYVTLAELRFPICSP | |
| | | QTDTNCVTFLVLDNTYYDYLDNTADTTRDHERQQKWT | |
| | | NMKMTPRYHLTSHINTLFSGTQQMQSAKETGKDSQFR | |
| | | ENIWKTAEVVKIIKDIASKNMQKQQTYYTKTYGAYATQY | |
| | | FTGKQYWDWRVGLFSPIFLSPSRLNPQEPGAYTEIAYN | |
| | | PWTDEGTGNIVCIQYLTKKDSHYKPGAGSKFAVTDVPL | |
| | | WAALFGYYDQCKKESKDANIRLNRLLLVRCPYTRPKLY | |
| | | NPRDPDQLFVMYSYNFGHGRMPGGDKYVPMEFKDRW | |
| | | YPCMLHQEEVVEEIVRCGPFAPKDMTPSVTCMARYSSL | |
| | | FTWGGNIIREQAVEDPCKKSTFAIPGAGGLARILQVSNP | |
| | | QRQAPTTTWHSWGWRRSLFTETGLKRMQEQQPYDEM | |
| | | SYTGPKRPKLSVPPAAEGNLAAGGGLFFRDGKQPASP | |
| | | GGSLPTQSETEAEAEDEEAHQEETEEGAQLQQLWEQQ | |
| | | LQQKRELGIVFQHLLRLRQGAEIHPGLV* | |
| FJ392115.1 | ACR20274.1 | MAAWWWGRRRRWRRWRRRRXPRRRRWRRRRRWP | 289 |
| | | RRRRRRWPRRRRRRRPARRLRRRRRRRRVRRPRRR | |
| | | QKLVLTQWNPQTQRKCVVRGFLPLFFCGQGAYHRNFV | |
| | | EHMDDVFPKGPSGGGFGSMVWNLDFLYQEFKKHHNR | |
| | | WSSSNRDFDLVRYHGTVIKFYRHSDFDYLVHVTRTPPF | |
| | | KEDLLTIVSHQPGLMMQNYRCILVKSYKTHPGGRPYITL | |
| | | KIRPPRLLTDKWYFQPDFCGVPLFKLYVTLAELRFPICS | |
| | | PQTDTNCVTFLVLDNTYYDYLDSTADTTRDNERHQKWK | |
| | | NMIMTPRYHLTSHINTLFSGTQQMQNAKETGKDSQFRE | |
| | | NIWKTEEVVKIIHDIASRNMQKQITYYTKTYGAYATQYFT | |
| | | GKQYWDWRVGLFSPIFLSPSRLNPQEPGAYTEIAYNPW | |
| | | TDEGTGNIVCIQYLTKKDSHYKPGAGSKFAVTDVPLWA | |
| | | ALFGYYDQCKKESKDANIRLNCLLLVRCPYTRPKLYNPR | |
| | | DPDQLFVMYSYNFGHGRMPGGDKYVPMEFKDRWYPC | |
| | | MLHQEEVVEEIVRCGPFAPKDMTPSVTCMARYSSLFTW | |
| | | GGNIIREQAVEDPCKKSTFAIPGAGGLARILQVSNPQRQ | |
| | | APTTTWHLWDWRRSLFTETGLKRMQEQQPYDEMSYT | |
| | | GPKRPKLSVPPAAEGNLAAGGGLFFRDRKQPTSPGGS | |
| | | LPTQSETEAEAEDEEAHQEETEEGAQLQQLWEQQLQQ | |
| | | KRELGIVFQHLLRLRQGAEIHPGLV* | |
| FJ392117.1 | ACR20277.1 | MAWWWWRRRRRPWRRRWRWKRRARVRTRRPRRAV | 290 |
| | | RRRRRRVRRRRRGWRRLYRRWRRKGRRRRRRKKLV | |
| | | MKQWNPSTVSRCYIVGYLPIIIMGQGTASMNYASHSDD | |
| | | VYYPGPFGGGISSMRFTLRILYDQFMRGQNFWTKTNED | |
| | | LDLARFLGSKWRFYRHKDVDFIVTYETSAPFTDSLESGP | |
| | | HQHPGIQMLMKNKILIPSFATKPKGRSSIKVRIQPPKLMI | |
| | | DKWYPQTDFCEVTLLTIHATACNLRFPFCSPQTDTSCV | |
| | | QFQVLSYNAYRQRISILPELCTREKLREFIKQVVKPNLTC | |
| | | INTLATPWCFKFPELDKLPPVANNATGWSVNPDSGDGD | |
| | | VIYQETTLETKWIANNDVWHTKDQRAHNNIHSQYGMPQ | |
| | | SDALEHKTGYFSPALLSPQRLNPQIPGLYINIVYNPLTDK | |
| | | GEGNKIWCDPLTKNTFGYDPPKSKFLIENLPLWSAVTG | |
| | | YVDYCTKASKDESFKYNYRVLIQTPYTVPALYSDSETTK | |
| | | NRGYIPIGTDFAYGRMPGGVQQIPIRWRMRWYPMLFN | |
| | | QQPVLEDLFQSGPFAYQGDAKSATLVGKYAFKWLWGG | |
| | | NRIFQQVVRDPRSHQQDQSVGPSRQPRAVQVFDPKYQ | |
| | | APQWTFHAWDIRRGLFGRQAIKRVSAKPTPDELISTGP | |
| | | KRPRLEVPAFQEEQEKDLLFRQRKHKAWEDTTEEETEA | |
| | | PSEEEEENQELQLVRRLQQQRELGRGLRCLFQQLTRT | |
| | | QMGLHVDPQLLAPV* | |
| GU797360.1 | ADO51761.1 | MAWGWWKRRRKWWWRRRWTRGRLRKRRARRAGRR | 291 |
| | | PRRRRVRRRRAWRRGRRKRRTFRRRRRRKGRRHRTR | |
| | | LIIRQWQPEIVRKCLIIGYFPMIICGQGRWSENYSSHLED | |
| | | RVVKQAFGGGHATTRWSLKVLYEENLRHLNFWTANTNR | |
| | | DLELARYLKVTWTFYRHQDVDFIIYFNRKSPMGGNIYTA | |
| | | PMMHPGALMLSKHKILVKSFKTKPKGKATVKVTIKPPTL | |
| | | LVDKWYFQKDICDMTLLNLNAVAADLRFPFCSPQTDNP | |
| | | CINFQVLSSVYNNFLSITDNRLTPVTDDGQAYYKAFLDA | |
| | | AFTKDRDFNAVNTFRTISNFSHPQLELPTKTTNTSQDQY | |
| | | FNTLDGYWGDPIYVHTQNIKPDQNLDKCKEILTNNMKN | |
| | | WHKKVKSENPSSLNHSCFAHNVGIFSSSFLSAGRLAPE | |
| | | VPGLYTDVIYNPYTDKGKGNMLWVDYCSKGDNLYKEG | |
| | | QSKCLLANLPLWMATNGYIDWVKKETDNWVINTQARVL | |
| | | MVCPYTYPKLYHEIQPLYGFVVYSYNFGEGKMPNGATY | |
| | | IPFKFRNKWYPTIYMQQAVLEDISRSGPFALKQQIPSATL | |
| | | TAKYKFKFLFGGNPTSEQVVRDPCTQPTFELPGASTQP | |
| | | PRIQVTDPKLLGPHYSFHSWDLRRGYYSTKSIKRMSEH | |
| | | EEPSEFIFPGPKKPRVDLGPIQQQERPSDSLQRESRPW | |
| | | ETSEEESEAEVQQEETEEVPLRQQLLHNLREQQQLRK | |
| | | GLQCVFQQLIKTQQGVHIDPSLL* | |
| DQ003341.1 | AAX94182.1 | MAWSWWWRRRKRWWPRRRRRWRRFRTRRARRAVP | 292 |
| | | RRRRRRRVRRRRWGRRGRRRRVFYKRRRRKTGRLYR | |
| | | KPKKKLVLTQWHPTTVRNCSIRGLVPLVLCGHTQGGRN | |
| | | FALRSDDYPKQGSPYGGSFSTTTWNLRVLFDEHQKHH | |
| | | NTWSYPNNQLDLGRYKGCTFCFYRGKKTDYIVKFQRR | |
| | | GPFKINKYSSPMAHPGMMMLDKMKILVPSFDTRPGGR* | |
| DQ003342.1 | AAX94185.1 | MAWSWWWRRRKRWWPRRRRRWRRFRTRRARRAVP | 293 |
| | | RRRRRRRVRRRRWGRRGRRRRVFYKRRRRKTGRLYR | |
| | | KPKKKLVLTQWHPTTVRNCSIRGLVPLVLCGHTQGGRN | |
| | | FALRSDDYPKQGSPYGGSFSTTTWNLRVLFDEHQKHH | |
| | | NTWSYPNNQLDLGRYKGCTFCFYRGKKTDYIVKFQRR | |
| | | GPFKINKYSSPMAHPGMMMLDKMKILVPSFDTRPGGR* | |
| DQ003343.1 | AAX94188.1 | MAWSWWWRRRKRWWPRRRRRWRRFRTRRARRAVP | 294 |
| | | RRRRRRRVRRRRWGRRRRRRRVFYKRRRRKTGRLYR | |
| | | KPKKKLVLTQWHPTTVRNCSIRGLVPLVLCGHTQGGRN | |
| | | FALRSDDYPKQGSPYGGSFSTTTWNLRVLFDEHQKHH | |
| | | NTWSYPNNQLDLGRYKGCTFYFYRDKKTDYIVKFQRR | |
| | | GPFKINKYSSPMAHPGMMMLDKMKILVPSFDTRPGGR* | |
| DQ003344.1 | AAX94191.1 | MAWSWWWRRRKRWWPRRRRRWRRFRTRRARRAVP | 295 |
| | | RRRRRRRVRRRRWGRRRRRRRVFYKRRRRKTGRLYR | |
| | | KPKKKLVLTQWHPTTVRNCSIRGLVPLVLCGHTQGGRN | |
| | | FALRSDDYPKQGSPYGGSFSTTTWNLRVLFDEHQKHH | |
| | | NTWSYPNNQLDLGRYKGCTFYFYRDKKTDYIVKFQRR | |
| | | GPFKINKYSSPMAHPGMMMLDKMKILVPSFDTRPGGR* | |
| DQ003341 .1 | AAX94183.1 | MYYGCIGINSTLTTKYENLFNKLYSKCCYFETFQTIAQLN | 296 |
| | | PGFKAAKKTTNGSGSTAATLGDAVTELKNPNGTFYTGN | |
| | | NSTFGCCTYKPTKQIGSNANKWFWHQLTATDSDTLGQ | |
| | | YGRASIQYMEYHTGIYSSIFLSPLRSNLELPTAYQDVTY | |
| | | NPLTDRGIGNRIWYQYSTKENTTFNETQCKCVLSDLPL | |
| | | WSMFYGYVDFIESELGISAEIHNFGIVOVQOPYTFPPMF | |
| | | DKSKPDKGYVFYDTLFGNGKMPDGSGHVPTYWQQRW | |
| | | WPRFSFQRQVMHDIILTGPFSYKDDSVMTGITAGYKFKF | |
| | | SWGGDMVSEQVIKNPERGDGRDSTYPDRQRRDSQVV | |
| | | DPRSMGPQWVFHTFDYRRGLFGKDAIKRVSEKPTDPD | |
| | | YFTTPYKKPRFFPPTAGEEKLQEEDSALQEKRSPLSSE | |
| | | EGQTRAQVLQQQVLQSELQQQQELGEQLRFLLREMFK | |
| | | TQAGIHMNPRAFQEL* | |
| DQ003342.1 | AAX94186.1 | MYYGCIGINSTLTTKYENLFNKLYSKCCYFETFQTIAQLN | 297 |
| | | PGFKAAKKTTNGSGSTAATLGDAVTELKNPNGTFYTGN | |
| | | NSTFGCCTYKPTKQIGSNANKWFWHQLTATDSDTLGQ | |
| | | YGRASIQYMEYHTGIYSSIFLSPLRSNLELPTAYQDVTY | |
| | | NPLTDRGIGNRIWYQYSTKENTTFNETQCKCVLSDLPL | |
| | | WSMFYGYVDFIESELGISAEIHNFGIVCVQCPYTFPPMF | |
| | | DKSKPDKGYVFYDTLFGNGKMPDGSGHVPTYWQQRW | |
| | | WPRFSFQRQVMHDIILTGPFSYKDDSVMTGITAGYKFKF | |
| | | SWGGDMVSEQVIKNPERGDGRDSTYPDRQRRDSQVV | |
| | | DPRSMGPQWVFHTFDYRRGLFGKDAIKRVSEKPTDPD | |
| | | YFTTPYKKPRFFPPTAGEEKLQEEDSALQEKRSPLSSE | |
| | | EGQTRAQVLQQQVLQSELQQQQELGEQLRFLLREMFK | |
| | | TQAGIHMNPRAFQEL* | |
| DQ003343.1 | AAX94189.1 | MYYDCIGINSTLTTKYENLFNKLYSKCCYFETFQTIAQLN | 298 |
| | | PGFKAAKKTTNGSGSTAATLGDAVTELKNPNGTFYTGN | |
| | | NSTFGCCTYKPTKQIGSNANKWFWHQLTATDSDTLGQ | |
| | | YGRASIQYMEYHTGIYSSIFLSPLRSNLEFPTAYQDVTY | |
| | | NPLTDRGIGNRIWYQYSTKENTTFNETQCKCVLSDLPL | |
| | | WSMFYGYVDFIESELGISAEIHNFGIVCVQCPYTFPPMF | |
| | | DKSKPDKGYVFYDTLFGNGKMPDGSGHVPTYWQQRW | |
| | | WPRFSFQRQVMHDIILTGPFSYKDDSVMTGITAGYKFKF | |
| | | SWGGDMVSEQVIKNSERGDGRDSTYPDRQRRDLQVV | |
| | | DPRSMGPQWVFHTFDYRRGLFGKDAIKRVSEKPTDPD | |
| | | YFTTPYKKPRFFPPTAGEEKLQEEDSALQEKRSPLSSE | |
| | | EGQTRAQVLQQQVLQSELQQQQELGEQLRFLLREMFK | |
| | | TQAGIHMNPRAFQEL* | |
| DQ003344.1 | AAX94192.1 | MYYDCIGINSTLTTKYENLFNKLYSKCCYFETFQTIAQLN | 299 |
| | | PGFKAAKKTTNGSGSTAATLGDAVTELKNPNGTFYTGN | |
| | | NSTFGCCTYKPTKQIGSNANKWFWHQLTATDSDTLGQ | |
| | | YGRASIQYMEYHTGIYSSIFLSPLRSNLEFPTAYQDVTY | |
| | | NPLTDRGIGNRIWYQYSTKENTTFNETQCKCVLSDLPL | |
| | | WSMFYGYVDFIESELGISAEIHNFGIVCVQCPYTFPPMF | |
| | | DKSKPDKGYVFYDTLFGNGKMPDGSGHVPTYWQQRW | |
| | | WPRFSFQRQVMHDIILTGPFSYKDDSVMTGITAGYKFKF | |
| | | SWGGDMVSEQVIKNSERGDGRDSTYPDRQRRDLQVV | |
| | | DPRSMGPQWVFHTFDYRRGLFGKDAIKRVSEKPTDPD | |
| | | YFTTPYKKPRFFPPTAGEEKLQEEDSALQEKRSPLSSE | |
| | | EGQTRAQVLQQQVLQSELQQQQELGEQLRFLLREMFK | |
| | | TQAGIHMNPRAFQEL* | |

[0409] In some embodiments, the genetic element comprises a nucleotide sequence encoding an amino acid sequence or a functional fragment thereof or a sequence having at least about 60%, 70% 80%, 85%, 90% 95%, 96%, 97%, 98%, 99%, or 100% sequence identity to any one of the amino acid sequences described herein, e.g., Table 17. In some embodiments, the substantially non-pathogenic protein comprises an amino acid sequence or a functional fragment thereof or a sequence having at least about 60%, 65%, 70%, 75%, 80%, 85%, 90% 95%, 96%, 97%, 98%, 99%, or 100% sequence identity to any one of the amino acid sequences described herein, e.g., as listed in any of Tables 2, 4, 6, 8, 10, 12, 14, 16, or 17.

[0410] In some embodiments, the genetic element comprises a nucleotide sequence encoding an amino acid sequence having about position 1 to about position 150 (e.g., or any subset of amino acids within each range, e.g., about position 20 to about position 35, about position 25 to about position 30, about position 26 to about 30), about position 150 to about position 390 (e.g., or any subset of amino acids within each range, e.g., about position 200 to about position 380, about position 205 to about position 375, about position 205 to about 371), about 390 to about position 525, about position 525 to about position 850 (e.g., or any subset of amino acids within each range, e.g., about position 530 to about position 840, about position 545 to about position 830, about position 550 to about 820), about 850 to about position 950 (e.g., or any subset of amino acids within each range, e.g., about position 860 to about position 940, about position 870 to about position 930, about position 880 to about 923) of the amino acid sequences described herein, e.g., as listed in any of Tables 2, 4, 6, 8, 10, 12, 14, 16, or 17, or shown in FIG. 1, or a functional fragment thereof. In some embodiments, the substantially non-pathogenic protein comprises an amino acid sequence or a functional fragment thereof or a sequence having at least about 60%, 65%, 70%, 75%, 80%, 85%, 90% 95%, 96%, 97%, 98%, 99%, or 100% sequence identity to about position 1 to about position 150 (e.g., or any subset of amino acids within each range as described herein), about position 150 to about position 390, about position 390 to about position 525, about position 525 to about position 850, about position 850 to about position 950 of the amino acid sequences described herein, e.g., as listed in any of Tables 2, 4, 6, 8, 10, 12, 14, 16, or 17, or as shown in FIG. 1.

[0411] In some embodiments, the substantially non-pathogenic protein comprises an amino acid sequence or a functional fragment thereof or a sequence having at least about 60%, 65%, 70%, 75%, 80%, 85%, 90% 95%, 96%, 97%, 98%, 99%, or 100% sequence identity to any one of the amino acid sequences or ranges of amino acids described herein, e.g., as listed in any of Tables 2, 4, 6, 8, 10, 12, 14, 16, or 17, or shown in FIG. 1, where the sequence is a functional domain or provides a function, e.g., species and/or tissue and/or cell tropism, viral genome binding and/or packaging, immune evasion (non-immunogenicity and/or tolerance), pharmacokinetics, endocytosis and/or cell attachment, nuclear entry, intracellular modulation and localization, exocytosis modulation, propagation, nucleic acid protection, and a combination thereof. In some embodiments, the ranges of amino acids with less sequence identity may provide one or more of the properties described herein and differences in cell/tissue/species specificity (e.g. tropism).

[0412] Protein Binding Sequence

[0413] A strategy employed by many viruses is that the viral capsid protein recognizes a specific protein binding sequence in its genome. For example, in viruses with unsegmented genomes, such as the L-A virus of yeast, there is a secondary structure (stem-loop) and a specific sequence at the 5′ end of the genome that are both used to bind the viral capsid protein. However, viruses with segmented genomes, such as Reoviridae, Orthomyxoviridae (influenza), Bunyaviruses and Arenaviruses, need to package each of the genomic segments. Some viruses utilize a complementarity region of the segments to aid the virus in including one of each of the genomic molecules. Other viruses have specific binding sites for each of the different segments. See for example, Curr Opin Struct Biol. 2010 February; 20(1): 114-120; and Journal of Virology (2003), 77(24), 13036-13041.

[0414] In some embodiments, the genetic element encodes a protein binding sequence that binds to the substantially non-pathogenic protein. In some embodiments, the protein binding sequence facilitates packaging the genetic element into the proteinaceous exterior. In some embodiments, the protein binding sequence specifically binds an arginine-rich region of the substantially non-pathogenic protein. In some embodiments, the genetic element comprises a protein binding sequence as described in Example 8. In some embodiments, the genetic element comprises a protein binding sequence having at least 70%, 80%, 85%, 90%, 95%, 96%, 97%, 98%, 99%, or 100% sequence identity to a 5′ UTR conserved domain or GC-rich domain of an Anellovirus sequence (e.g., as shown in any of Tables 1, 3, 5, 7, 9, 11, or 13). In embodiments, the protein binding sequence has at least about 70%, 75%, 80%, 85%, 90%, 95%, 96%, 97%, 98%, 99%, or 100% sequence identity to the Anellovirus 5′ UTR conserved domain nucleotide sequence of Table 1 (e.g., nucleotides 177-247 of the nucleic acid sequence of Table 1). In embodiments, the protein binding sequence has at least about 70%, 75%, 80%, 85%, 90%, 95%, 96%, 97%, 98%, 99%, or 100% sequence identity to the Anellovirus GC-rich nucleotide sequence of Table 1 (e.g., nucleotides 3415-3570 of the nucleic acid sequence of Table 1). In embodiments, the protein binding sequence has at least about 70%, 75%, 80%, 85%, 90%, 95%, 96%, 97%, 98%, 99%, or 100% sequence identity to the Anellovirus 5′ UTR conserved domain nucleotide sequence of Table 3 (e.g., nucleotides 174-244 of the nucleic acid sequence of Table 3). In embodiments, the protein binding sequence has at least about 70%, 75%, 80%, 85%, 90%, 95%, 96%, 97%, 98%, 99%, or 100% sequence identity to the Anellovirus GC-rich nucleotide sequence of Table 3 (e.g., nucleotides 3691-3794 of the nucleic acid sequence of Table 3). In embodiments, the protein binding sequence has at least about 70%, 75%, 80%, 85%, 90%, 95%, 96%, 97%, 98%, 99%, or 100% sequence identity to the Anellovirus 5′ UTR conserved domain nucleotide sequence of Table 5 (e.g., nucleotides 170-240 of the nucleic acid sequence of Table 5). In embodiments, the protein binding sequence has at least about 70%, 75%, 80%, 85%, 90%, 95%, 96%, 97%, 98%, 99%, or 100% sequence identity to the Anellovirus GC-rich nucleotide sequence of Table 5 (e.g., nucleotides 3632-3753 of the nucleic acid sequence of Table 5). In embodiments, the protein binding sequence has at least about 70%, 75%, 80%, 85%, 90%, 95%, 96%, 97%, 98%, 99%, or 100% sequence identity to the Anellovirus 5′ UTR conserved domain nucleotide sequence of Table 7 (e.g., nucleotides 174-244 of the nucleic acid sequence of Table 7). In embodiments, the protein binding sequence has at least about 70%, 75%, 80%, 85%, 90%, 95%, 96%, 97%, 98%, 99%, or 100% sequence identity to the Anellovirus GC-rich nucleotide sequence of Table 7 (e.g., nucleotides 3733-3853 of the nucleic acid sequence of Table 7). In embodiments, the protein binding sequence has at least about 70%, 75%, 80%, 85%, 90%, 95%, 96%, 97%, 98%, 99%, or 100% sequence identity to the Anellovirus 5′ UTR conserved domain nucleotide sequence of Table 9 (e.g., nucleotides 171-241 of the nucleic acid sequence of Table 9). In embodiments, the protein binding sequence has at least about 70%, 75%, 80%, 85%, 90%, 95%, 96%, 97%, 98%, 99%, or 100% sequence identity to the Anellovirus GC-rich nucleotide sequence of Table 9 (e.g., nucleotides 3644-3758 of the nucleic acid sequence of Table 9). In embodiments, the protein binding sequence has at least about 70%, 75%, 80%, 85%, 90%, 95%, 96%, 97%, 98%, 99%, or 100% sequence identity to the Anellovirus 5′ UTR conserved domain nucleotide sequence of Table 11 (e.g., nucleotides 323-393 of the nucleic acid sequence of Table 11). In embodiments, the protein binding sequence has at least about 70%, 75%, 80%, 85%, 90%, 95%, 96%, 97%, 98%, 99%, or 100% sequence identity to the Anellovirus GC-rich nucleotide sequence of Table 11 (e.g., nucleotides 2868-2929 of the nucleic acid sequence of Table 11). In embodiments, the protein binding sequence has at least about 70%, 75%, 80%, 85%, 90%, 95%, 96%, 97%, 98%, 99%, or 100% sequence identity to the Anellovirus 5′ UTR conserved domain nucleotide sequence of Table 13 (e.g., nucleotides 117-187 of the nucleic acid sequence of Table 13). In embodiments, the protein binding sequence has at least about 70%, 75%, 80%, 85%, 90%, 95%, 96%, 97%, 98%, 99%, or 100% sequence identity to the Anellovirus GC-rich nucleotide sequence of Table 13 (e.g., nucleotides 3054-3172 of the nucleic acid sequence of Table 13).

[0415] In some embodiments, the genetic element (e.g., protein-binding sequence of the genetic element) comprises a nucleic acid sequence having at least about 75% (e.g., at least 75%, 80%, 85%, 90%, 95%, 96%, 97%, 98%, 99%, or 100%) identity to a nucleic acid sequence shown in Table 16-1 and/or FIG. 21. In some embodiments, the genetic element (e.g., protein-binding sequence of the genetic element) comprises a nucleic acid sequence of the Consensus 5′ UTR sequence shown in Table 16-1, wherein X₁, X₂, X₃, X₄, and X₅ are each independently any nucleotide, e.g., wherein X₁=G or T, X₂=C or A, X₃=G or A, X₄=T or C, and X₅=A, C, or T). In embodiments, the genetic element (e.g., protein-binding sequence of the genetic element) comprises a nucleic acid sequence having at least about 75% (e.g., at least 75%, 80%, 85%, 90%, 95%, 96%, 97%, 98%, 99%, or 100%) identity to the Consensus 5′ UTR sequence shown in Table 16-1. In embodiments, the genetic element (e.g., protein-binding sequence of the genetic element) comprises a nucleic acid sequence having at least about 75% (e.g., at least 75%, 80%, 85%, 90%, 95%, 96%, 97%, 98%, 99%, or 100%) identity to the exemplary TTV 5′ UTR sequence shown in Table 16-1. In embodiments, the genetic element (e.g., protein-binding sequence of the genetic element) comprises a nucleic acid sequence having at least about 75% (e.g., at least 75%, 80%, 85%, 90%, 95%, 96%, 97%, 98%, 99%, or 100%) identity to the TTV-CT30F 5′ UTR sequence shown in Table 16-1. In embodiments, the genetic element (e.g., protein-binding sequence of the genetic element) comprises a nucleic acid sequence having at least about 75% (e.g., at least 75%, 80%, 85%, 90%, 95%, 96%, 97%, 98%, 99%, or 100%) identity to the TTV-HD23a 5′ UTR sequence shown in Table 16-1. In embodiments, the genetic element (e.g., protein-binding sequence of the genetic element) comprises a nucleic acid sequence having at least about 75% (e.g., at least 75%, 80%, 85%, 90%, 95%, 96%, 97%, 98%, 99%, or 100%) identity to the TTV-JA20 5′ UTR sequence shown in Table 16-1. In embodiments, the genetic element (e.g., protein-binding sequence of the genetic element) comprises a nucleic acid sequence having at least about 75% (e.g., at least 75%, 80%, 85%, 90%, 95%, 96%, 97%, 98%, 99%, or 100%) identity to the TTV-TJN02 5′ UTR sequence shown in Table 16-1. In embodiments, the genetic element (e.g., protein-binding sequence of the genetic element) comprises a nucleic acid sequence having at least about 75% (e.g., at least 75%, 80%, 85%, 90%, 95%, 96%, 97%, 98%, 99%, or 100%) identity to the TTV-tth8 5′ UTR sequence shown in Table 16-1.

TABLE 16-1
Exemplary 5' UTR sequences from Anelloviruses

| | | SEQ |
|---|---|---|
| | | ID |
| Source | Sequence | NO: |
| Consensus | CGGGTGCCGX1AGGTGAGTTTACACACCGX2AGT | 715 |
| | CAAGGGGCAATTCGGGCTCX3GGACTGGCCGGG | |
| | CX4X5TGGG | |
| | X₁ = G or T | |
| | X₂ = C or A | |
| | X₃ = G or A | |
| | X₄ = T or C | |
| | X₅ = A, C, or T | |
| Exemplary | CGGGTGCCGGAGGTGAGTTTACACACCGCAGTC | 703 |
| TTV | AAGGGGCAATTCGGGCTCGGGACTGGCCGGGCT | |
| Sequence | WTGGG | |
| TTV-CT30F | CGGGTGCCGTAGGTGAGTTTACACACCGCAGTC | 704 |
| | AAGGGGCAATTCGGGCTCGGGACTGGCCGGGCT | |
| | ATGGG | |
| TTV-HD23a | CGGGTGCCGGAGGTGAGTTTACACACCGCAGTC | 705 |
| | AAGGGGCAATTCGGGCTCGGGACTGGCCGGGCC | |
| | CTGGG | |
| TTV-JA20 | CGGGTGCCGGAGGTGAGTTTACACACCGCAGTC | 706 |
| | AAGGGGCAATTCGGGCTCGGGACTGGCCGGGCT | |
| | TTGGG | |
| TTV-TJN02 | CGGGTGCCGGAGGTGAGTTTACACACCGCAGTC | 707 |
| | AAGGGGCAATTCGGGCTCGGGACTGGCCGGGCT | |
| | ATGGG | |
| TTV-tth8 | CGGGTGCCGGAGGTGAGTTTACACACCGAAGTC | 708 |
| | AAGGGGCAATTCGGGCTCAGGACTGGCCGGGCT | |
| | TTGGG | |

[0416] In some embodiments, the genetic element (e.g., protein-binding sequence of the genetic element) comprises a nucleic acid sequence having at least about 75% (e.g., at least 75%, 80%, 85%, 90%, 95%, 96%, 97%, 98%, 99%, or 100%) identity to a nucleic acid sequence shown in Table 16-2 and/or FIG. 22. In embodiments, the genetic element (e.g., protein-binding sequence of the genetic element) comprises a nucleic acid sequence of the Consensus GC-rich sequence shown in Table 16-1, wherein X₁, X₄, X₅, X₆, X₇, X₁₂, X₁₃, X₁₄, X₁₅, X₂₀, X₂₁, X₂₂, X₂₆, X₂₉, X₃₀, and X₃₃ are each independently any nucleotide and wherein X₂, X₃, X₈, X₉, X₁₀, X₁₁, X₁₆, X₁₇, X₁₈, X₁₉, X₂₃, X₂₄, X₂₅, X₂₇, X₂₈, X₃₁, X₃₂, and X₃₄ are each independently absent or any nucleotide. In some embodiments, one or more of (e.g., all of) X₁ through X₃₄ are each independently the nucleotide (or absent) specified in Table 16-2. In embodiments, the genetic element (e.g., protein-binding sequence of the genetic element) comprises a nucleic acid sequence having at least about 75% (e.g., at least 75%, 80%, 85%, 90%, 95%, 96%, 97%, 98%, 99%, or 100%) identity to the Consensus GC-rich sequence shown in Table 16-1. In embodiments, the genetic element (e.g., protein-binding sequence of the genetic element) comprises a nucleic acid sequence having at least about 75% (e.g., at least 75%, 80%, 85%, 90%, 95%, 96%, 97%, 98%, 99%, or 100%) identity to an exemplary TTV GC-rich sequence shown in Table 16-1 (e.g., the full sequence, Fragment 1, Fragment 2, Fragment 3, or any combination thereof, e.g., Fragments 1-3 in order). In embodiments, the genetic element (e.g., protein-binding sequence of the genetic element) comprises a nucleic acid sequence having at least about 75% (e.g., at least 75%, 80%, 85%, 90%, 95%, 96%, 97%, 98%, 99%, or 100%) identity to a TTV-CT30F GC-rich sequence shown in Table 16-1 (e.g., the full sequence, Fragment 1, Fragment 2, Fragment 3, Fragment 4, Fragment 5, Fragment 6, Fragment 7, Fragment 8, or any combination thereof, e.g., Fragments 1-7 in order). In embodiments, the genetic element (e.g., protein-binding sequence of the genetic element) comprises a nucleic acid sequence having at least about 75% (e.g., at least 75%, 80%, 85%, 90%, 95%, 96%, 97%, 98%, 99%, or 100%) identity to a TTV-HD23a GC-rich sequence shown in Table 16-1 (e.g., the full sequence, Fragment 1, Fragment 2, Fragment 3, Fragment 4, Fragment 5, Fragment 6, or any combination thereof, e.g., Fragments 1-6 in order). In embodiments, the genetic element (e.g., protein-binding sequence of the genetic element) comprises a nucleic acid sequence having at least about 75% (e.g., at least 75%, 80%, 85%, 90%, 95%, 96%, 97%, 98%, 99%, or 100%) identity to a TTV-JA20 GC-rich sequence shown in Table 16-1 (e.g., the full sequence, Fragment 1, Fragment 2, or any combination thereof, e.g., Fragments 1 and 2 in order). In embodiments, the genetic element (e.g., protein-binding sequence of the genetic element) comprises a nucleic acid sequence having at least about 75% (e.g., at least 75%, 80%, 85%, 90%, 95%, 96%, 97%, 98%, 99%, or 100%) identity to a TTV-TJN02 GC-rich sequence shown in Table 16-1 (e.g., the full sequence, Fragment 1, Fragment 2, Fragment 3, Fragment 4, Fragment 5, Fragment 6, Fragment 7, Fragment 8, or any combination thereof, e.g., Fragments 1-8 in order). In embodiments, the genetic element (e.g., protein-binding sequence of the genetic element) comprises a nucleic acid sequence having at least about 75% (e.g., at least 75%, 80%, 85%, 90%, 95%, 96%, 97%, 98%, 99%, or 100%) identity to a TTV-tth8 GC-rich sequence shown in Table 16-1 (e.g., the full sequence, Fragment 1, Fragment 2, Fragment 3, Fragment 4, Fragment 5, Fragment 6, or any combination thereof, e.g., Fragments 1-6 in order).

TABLE 16-2
Exemplary GC-rich sequences from Anelloviruses

| Source | Sequence | | SEQ ID NO: |
|---|---|---|---|
| Consensus | CGGCGGX₁GGX₂GX₃X₄X₅CGCGCTX₆CG | | 743 |
| | CGCGCX₇X₈X₉X₁₀CX₁₁X₁₂X₁₃X₁₄GGGGX₁₅ | | |
| | X₁₆X₁₇X₁₈X₁₉X₂₀X₂₁GCX₂₂X₂₃X₂₄X₂₅CCCCC | | |
| | CCX₂₆CGCGCATX₂₇X₂₈GCX₂₉CGGGX₃₀CC | | |
| | CCCCCCCX₃₁X₃₂X₃₃GGGGGGCTCCGX₃₄C | | |
| | CCCCCGGCCCCCC | | |
| | X₁ = G or C | | |
| | X₂ = G , C, or absent | | |
| | X₃ = C or absent | | |
| | X₄ = G or C | | |
| | X₅ = G or C | | |
| | X₆ = T, G, or A | | |
| | X₇ = G or C | | |
| | X₈ = G or absent | | |
| | X₉ = C or absent | | |
| | X₁₀ = C or absent | | |
| | X₁₁ = G, A, or absent | | |
| | X₁₂ = G or C | | |
| | X₁₃ = C or T | | |
| | X₁₄ = G or A | | |
| | X₁₅ = G or A | | |
| | X₁₆ = A, G, T, or absent | | |
| | X₁₇ = G, C, or absent | | |
| | X₁₈ = G, C, or absent | | |
| | X₁₉ = C, A, or absent | | |
| | X₂₀ = C or A | | |
| | X₂₁ = T or A | | |
| | X₂₂ = G or C | | |
| | X₂₃ = G, T, or absent | | |
| | X₂₄ = C or absent | | |
| | X₂₅ = G, C, or absent | | |
| | X₂₆ = G or C | | |
| | X₂₇ = G or absent | | |
| | X₂₈ = C or absent | | |
| | X₂₉ = G or A | | |
| | X₃₀ = G or T | | |
| | X₃₁ = C, T, or absent | | |
| | X₃₂ = G, C, A, or absent | | |
| | X₃₃ = G or C | | |
| | X₃₄ = C or absent | | |
| Exemplary TTV | Full Sequence | GCCGCCGCGGCGGCGGSGGNGNSGCG | 709 |
| Sequence | | CGCTDCGCGCGCSNNNCRCCRGGGGGN | |
| | | NNNCWGCSNCNCCCCCCCCCGCGCAT | |
| | | GCGCGGGKCCCCCCCCCNNCGGGGGG | |
| | | CTCCGCCCCCCGGCCCCCCCCCGTGCT | |
| | | AAACCCACCGCGCATGCGCGACCACG | |
| | | CCCCCGCCGCC | |
| | Fragment 1 | GCCGCCGCGGCGGCGGSGGNGNSGCG | 716 |
| | | CGCTDCGCGCGCSNNNCRCCRGGGGGN | |
| | | NNNCWGCSNCNCCCCCCCCCGCGCAT | |
| | Fragment 2 | GCGCGGGKCCCCCCCCCNNCGGGGGG | 717 |
| | | CTCCG | |
| | Fragment 3 | CCCCCCGGCCCCCCCCCGTGCTAAACC | |
| | | CACCGCGCATGCGCGACCACGCCCCCG | 718 |
| | | CCGCC | |
| TTV-CT30F | Full sequence | GCGGCGG-GGGGGCG-GCCGCG- | 710 |
| | | TTCGCGCGCCGCCCACCAGGGGGTG-- | |
| | | CTGCG-CGCCCCCCCCCGCGCAT | |
| | | GCGCGGGGCCCCCCCCC-- | 710 |
| | | GGGGGGGCTCCGCCCCCCCGGCCCCCC | |
| | | CCCGTGCTAAACCCACCGCGCATGCGC | |
| | | GACCACGCCCCCGCCGCC | |
| | Fragment 1 | GCGGCGG | 719 |
| | Fragment 2 | GGGGGCG | 720 |
| | Fragment 3 | GCCGCG | 721 |
| | Fragment 4 | TTCGCGCGCCGCCCACCAGGGGGTG | 722 |
| | Fragment 5 | CTGCG | 723 |
| | Fragment 6 | CGCCCCCCCCCGCGCAT | 724 |
| | Fragment 7 | GCGCGGGGCCCCCCCCC | 725 |
| | Fragment 8 | GGGGGGGCTCCGCCCCCCCGGCCCCCC | 726 |
| | | CCCGTGCTAAACCCACCGCGCATGCGC | |
| | | GACCACGCCCCCGCCGCC | |
| TTV-HD23a | Full sequence | CGGCGGCGGCGGCG- | 711 |
| | | CGCGCGCTGCGCGCGCG--- | |
| | | CGCCGGGGGGGCGCCAGCG- | |
| | | CCCCCCCCCCCGCGCAT | |
| | | GCACGGGTCCCCCCCCCCACGGGGGGC | |
| | | TCCGCCCCCCGGCCCCCCCCC | |
| | Fragment 1 | CGGCGGCGGCGGCG | 727 |
| | Fragment 2 | CGCGCGCTGCGCGCGCG | 728 |
| | Fragment 3 | CGCCGGGGGGGCGCCAGCG | 729 |
| | Fragment 4 | CCCCCCCCCCCGCGCAT | 730 |
| | Fragment 5 | GCACGGGTCCCCCCCCCCACGGGGGGC | 731 |
| | | TCCG | |
| | Fragment 6 | CCCCCCGGCCCCCCCCC | 732 |
| TTV-JA20 | Full sequence | CCGTCGGCGGGGGGGCCGCGCGCTGC | 712 |
| | | GCGCGCGGCCC- | |
| | | CCGGGGGAGGCACAGCCTCCCCCCCCC | |
| | | GCGCGCATGCGCGCGGGTCCCCCCCCC | |
| | | TCCGGGGGGCTCCGCCCCCCGGCCCCC | |
| | | CCC | |
| | Fragment 1 | CCGTCGGCGGGGGGGCCGCGCGCTGC | 733 |
| | | GCGCGCGGCCC | |
| | Fragment 2 | CCGGGGGAGGCACAGCCTCCCCCCCCC | 734 |
| | | GCGCGCATGCGCGCGGGTCCCCCCCCC | |
| | | TCCGGGGGGCTCCGCCCCCCGGCCCCC | |
| | | CCC | |
| TTV-TJN02 | Full sequence | CGGCGGCGGCG- | 713 |
| | | CGCGCGCTACGCGCGCG--- | |
| | | CGCCGGGGGG----CTGCCGC- | |
| | | CCCCCCCCCGCGCAT | |
| | | GCGCGGGGCCCCCCCCC- | |
| | | GCGGGGGGCTCCG | |
| | | CCCCCCGGCCCCCC | |
| | Fragment 1 | CGGCGGCGGCG | 735 |
| | Fragment 2 | CGCGCGCTACGCGCGCG | 736 |
| | Fragment 3 | CGCCGGGGGG | 737 |
| | Fragment 4 | CTGCCGC | 738 |
| | Fragment 5 | CCCCCCCCCGCGCAT | 739 |
| | Fragment 6 | GCGCGGGGCCCCCCCCC | 740 |
| | Fragment 7 | GCGGGGGGCTCCG | 741 |
| | Fragment 8 | CCCCCCGGCCCCCC | 742 |
| TTV-tth8 | Full sequence | GCCGCCGCGGCGGCGGGGG- | 714 |
| | | GCGGCGCGCTGCGCGCGCCGCCCAGTA | |
| | | GGGGGAGCCATGCG--- | |
| | | CCCCCCCCCGCGCAT | |
| | | GCGCGGGGCCCCCCCCC- | |
| | | GCGGGGGGCTCCG | |
| | | CCCCCCGGCCCCCCCCG | |
| | Fragment 1 | GCCGCCGCGGCGGCGGGGG | 744 |
| | Fragment 2 | GCGGCGCGCTGCGCGCGCCGCCCAGTA | 745 |
| | | GGGGGAGCCATGCG | |
| | Fragment 3 | CCCCCCCCCGCGCAT | 746 |
| | Fragment 4 | GCGCGGGGCCCCCCCCC | 747 |
| | Fragment 5 | GCGGGGGGCTCCG | 748 |
| | Fragment 6 | CCCCCCGGCCCCCCCCG | 749 |

[0417] Effector

[0418] In some embodiments, the genetic element may include one or more sequences that encode a functional nucleic acid, e.g., an exogenous effector, e.g., a therapeutic, e.g., a regulatory nucleic acid, e.g., cytotoxic or cytolytic RNA or protein. In some embodiments, the functional nucleic acid is a non-coding RNA.

[0419] In some embodiments, the sequence encoding an exogenous effector is inserted into the genetic element, e.g., at an insert site as described in Example 10, 12, or 22. In embodiments, the sequence encoding an exogenous effector is inserted into the genetic element at a noncoding region, e.g., a noncoding region disposed 3′ of the open reading frames and 5′ of the GC-rich region of the genetic element, in the 5′ noncoding region upstream of the TATA box, in the 5′ UTR, in the 3′ noncoding region downstream of the poly-A signal, or upstream of the GC-rich region. In embodiments, the sequence encoding an exogenous effector is inserted into the genetic element at about nucleotide 3588 of a TTV-tth8 plasmid, e.g., as described herein or at about nucleotide 2843 of a TTMV-LY2 plasmid, e.g., as described herein. In embodiments, the sequence encoding an exogenous effector is inserted into the genetic element at or within nucleotides 336-3015 of a TTV-tth8 plasmid, e.g., as described herein, or at or within nucleotides 242-2812 of a TTV-LY2 plasmid, e.g., as described herein. In some embodiments, the sequence encoding an exogenous effector replaces part or all of an open reading frame (e.g., an ORF as described herein, e.g., an ORF1, ORF1/1, ORF1/2, ORF2, ORF2/2, ORF2/3, and/or ORF2t/3 as shown in any of Tables 1-14).

[0420] In some embodiments, the sequence encoding an exogenous effector comprises 100-2000, 100-1000, 100-500, 100-200, 200-2000, 200-1000, 200-500, 500-1000, 500-2000, or 1000-2000 nucleotides. In some embodiments, the exogenous effector is a nucleic acid or protein payload, e.g., as described in Example 11.

[0421] Regulatory Nucleic Acid

[0422] In some embodiments, the regulatory nucleic acids modify expression of an endogenous gene and/or an exogenous gene. In one embodiment, the regulatory nucleic acid targets a host gene. The regulatory nucleic acids may include, but are not limited to, a nucleic acid that hybridizes to an endogenous gene (e.g., miRNA, siRNA, mRNA, lncRNA, RNA, DNA, an antisense RNA, gRNA as described herein elsewhere), nucleic acid that hybridizes to an exogenous nucleic acid such as a viral DNA or RNA, nucleic acid that hybridizes to an RNA, nucleic acid that interferes with gene transcription, nucleic acid that interferes with RNA translation, nucleic acid that stabilizes RNA or destabilizes RNA such as through targeting for degradation, and nucleic acid that modulates a DNA or RNA binding factor. In embodiments, the regulatory nucleic acid encodes an miRNA.

[0423] In some embodiments, the regulatory nucleic acid comprises RNA or RNA-like structures typically containing 5-500 base pairs (depending on the specific RNA structure, e.g., miRNA 5-30 bps, lncRNA 200-500 bps) and may have a nucleobase sequence identical (or complementary) or nearly identical (or substantially complementary) to a coding sequence in an expressed target gene within the cell, or a sequence encoding an expressed target gene within the cell.

[0424] In some embodiments, the regulatory nucleic acid comprises a nucleic acid sequence, e.g., a guide RNA (gRNA). In some embodiments, the DNA targeting moiety comprises a guide RNA or nucleic acid encoding the guide RNA. A gRNA short synthetic RNA can be composed of a “scaffold” sequence necessary for binding to the incomplete effector moiety and a user-defined ˜20 nucleotide targeting sequence for a genomic target. In practice, guide RNA sequences are generally designed to have a length of between 17-24 nucleotides (e.g., 19, 20, or 21 nucleotides) and complementary to the targeted nucleic acid sequence. Custom gRNA generators and algorithms are available commercially for use in the design of effective guide RNAs. Gene editing has also been achieved using a chimeric “single guide RNA” (“sgRNA”), an engineered (synthetic) single RNA molecule that mimics a naturally occurring crRNA-tracrRNA complex and contains both a tracrRNA (for binding the nuclease) and at least one crRNA (to guide the nuclease to the sequence targeted for editing). Chemically modified sgRNAs have also been demonstrated to be effective in genome editing; see, for example, Hendel et al. (2015) Nature Biotechnol., 985-991.

[0425] The regulatory nucleic acid comprises a gRNA that recognizes specific DNA sequences (e.g., sequences adjacent to or within a promoter, enhancer, silencer, or repressor of a gene).

[0426] Certain regulatory nucleic acids can inhibit gene expression through the biological process of RNA interference (RNAi). RNAi molecules comprise RNA or RNA-like structures typically containing 15-50 base pairs (such as about 18-25 base pairs) and having a nucleobase sequence identical (complementary) or nearly identical (substantially complementary) to a coding sequence in an expressed target gene within the cell. RNAi molecules include, but are not limited to: short interfering RNAs (siRNAs), double-strand RNAs (dsRNA), micro RNAs (miRNAs), short hairpin RNAs (shRNA), meroduplexes, and dicer substrates (U.S. Pat. Nos. 8,084,599 8,349,809 and 8,513,207).

[0427] Long non-coding RNAs (lncRNA) are defined as non-protein coding transcripts longer than 100 nucleotides. This somewhat arbitrary limit distinguishes lncRNAs from small regulatory RNAs such as microRNAs (miRNAs), short interfering RNAs (siRNAs), and other short RNAs. In general, the majority (˜78%) of lncRNAs are characterized as tissue-specific. Divergent lncRNAs that are transcribed in the opposite direction to nearby protein-coding genes (comprise a significant proportion ˜20% of total lncRNAs in mammalian genomes) may possibly regulate the transcription of the nearby gene.

[0428] The genetic element may encode regulatory nucleic acids with a sequence substantially complementary, or fully complementary, to all or a fragment of an endogenous gene or gene product (e.g., mRNA). The regulatory nucleic acids may complement sequences at the boundary between introns and exons to prevent the maturation of newly-generated nuclear RNA transcripts of specific genes into mRNA for transcription. The regulatory nucleic acids that are complementary to specific genes can hybridize with the mRNA for that gene and prevent its translation. The antisense regulatory nucleic acid can be DNA, RNA, or a derivative or hybrid thereof.

[0429] The length of the regulatory nucleic acid that hybridizes to the transcript of interest may be between 5 to 30 nucleotides, between about 10 to 30 nucleotides, or about 11, 12, 13, 14, 15, 16, 17, 18, 19, 20, 21, 22, 23, 24, 25, 26, 27, 28, 29, 30 or more nucleotides. The degree of identity of the regulatory nucleic acid to the targeted transcript should be at least 75%, at least 80%, at least 85%, at least 90%, or at least 95%.

[0430] The genetic element may encode a regulatory nucleic acids, e.g., a micro RNA (miRNA) molecule identical to about 5 to about 25 contiguous nucleotides of a target gene. In some embodiments, the miRNA sequence targets a mRNA and commences with the dinucleotide AA, comprises a GC-content of about 30-70% (about 30-60%, about 40-60%, or about 45%-55%), and does not have a high percentage identity to any nucleotide sequence other than the target in the genome of the mammal in which it is to be introduced, for example as determined by standard BLAST search.

[0431] In some embodiments, the regulatory nucleic acid is at least one miRNA, e.g., 2, 3, 4, 5, 6, or more. In some embodiments, the genetic element comprises a sequence that encodes an miRNA at least about 75%, 80%, 85%, 90% 95%, 96%, 97%, 98%, 99% or 100% nucleotide sequence identity to any one of the nucleotide sequences or a sequence that is complementary to a sequence described herein, e.g., in Table 18.

TABLE 18
Examples of regulatory nucleic acids e.g., miRNAs.

| Accession | Exemplary | | | | | | |
|---|---|---|---|---|---|---|---|
| number of | subsequence | | SEQ ID | miRNA_5prime | SEQ ID | miRNA_3prime | SEQ ID |
| strain | nucleotides | Pre_miRNA | NO: | _per_MiRdup | NO: | _per_MiRdup | NO: |
| AB008394.1 | AB008394_347 | GCCAUUUUAAGUA | 300 | AGUAGCUGAC | 395 | CAUCCUCGGC | 490 |
| | 5_3551 | GCUGACGUCAAGG | | GUCAAGGAUU | | GGAAGCUACA | |
| | | AUUGACGUAAAGG | | GAC(5') | | CAA(3') | |
| | | UUAAAGGUCAUCC | | | | | |
| | | UCGGCGGAAGCUA | | | | | |
| | | CACAAAAUGGU | | | | | |
| AB008394.1 | AB008394_357 | GCGUACGUCACAA | 301 | CAAGUCACGU | 396 | GGCCCCGUCA | 491 |
| | 9_3657 | GUCACGUGGAGGG | | GGAGGGGACC | | CGUGACUUAC | |
| | | GACCCGCUGUAAC | | CG(5') | | CAC(3') | |
| | | CCGGAAGUAGGCC | | | | | |
| | | CCGUCACGUGACU | | | | | |
| | | UACCACGUGUGUA | | | | | |
| AB017613.1 | AB017613_346 | GCCAUUUUAAGUA | 302 | AAGUAGCUGA | 397 | UCAUCCUCGG | 492 |
| | 2_3539 | GCUGACGUCAAGG | | CGUCAAGGAU | | CGGAAGCUAC | |
| | | AUUGACGUGAAGG | | UGACG(5') | | ACAA(3') | |
| | | UUAAAGGUCAUCC | | | | | |
| | | UCGGCGGAAGCUA | | | | | |
| | | CACAAAAUGGUG | | | | | |
| AB017613.1 | AB017613_356 | GCACACGUCAUAA | 303 | AUAAGUCACG | 398 | GGCCCCGUCA | 493 |
| | 6_3644 | GUCACGUGGUGGG | | UGGUGGGGAC | | CGUGAUUUGU | |
| | | GACCCGCUGUAAC | | CCG(5') | | CAC(3') | |
| | | CCGGAAGUAGGCC | | | | | |
| | | CCGUCACGUGAUU | | | | | |
| | | UGUCACGUGUGUA | | | | | |
| AB025946.1 | AB025946_353 | CUUCCGGGUCAUA | 304 | UGGGGAGGGU | 399 | CCGGGUCAUA | 494 |
| | 4_3600 | GGUCACACCUACG | | UGGCGUAUAG | | GGUCACACCU | |
| | | UCACAAGUCACGU | | CCCGGA(3') | | ACGUCAC(5') | |
| | | GGGGAGGGUUGGC | | | | | |
| | | GUAUAGCCCGGAA | | | | | |
| | | G | | | | | |
| AB025946.1 | AB025946_373 | GCCGGGGGGCUGC | 305 | CCCCCCCCGG | 400 | GGCUGCCGCC | 495 |
| | 0_3798 | CGCCCCCCCCGGG | | GGGGGGGUUU | | CCCCCCGGGG | |
| | | GAAAGGGGGGGGC | | GCCC(3') | | AAA00000(5') | |
| | | CCCCCCCGGGGGG | | | | | |
| | | GGGUUUGCCCCCC | | | | | |
| | | GGC | | | | | |
| AB028668.1 | AB028668_353 | AUACGUCAUCAGU | 306 | AUCAGUCACG | 401 | AUCCUCGUCC | 496 |
| | 7_3615 | CACGUGGGGGAAG | | UGGGGGAAGG | | ACGUGACUGU | |
| | | GCGUGCCUAAACC | | CGUGC(5') | | GA(3') | |
| | | CGGAAGCAUCCUC | | | | | |
| | | GUCCACGUGACUG | | | | | |
| | | UGACGUGUGUGGC | | | | | |
| AB028669.1 | AB028669_344 | CAUUUUAAGUAAG | 307 | AAGUAAGGCG | 402 | GAGCACUUCC | 497 |
| | 0_3513 | GCGGAAGCAGCUC | | GAAGCAGCUC | | GGCUUGCCCA | |
| | | GGCGUACACAAAA | | GG(5') | | A(3') | |
| | | UGGCGGCGGAGCA | | | | | |
| | | CUUCCGGCUUGCC | | | | | |
| | | CAAAAUGG | | | | | |
| AB028669.1 | AB028669_354 | GUCACAAGUCACG | 308 | AGUCACGUGG | 403 | CAAUCCUCUU | 498 |
| | 8_3619 | UGGGGAGGGUUGG | | GGAGGGUUGG | | ACGUGGCCUG | |
| | | CGUUUAACCCGGA | | C(5') | | (3') | |
| | | AGCCAAUCCUCUU | | | | | |
| | | ACGUGGCCUGUCA | | | | | |
| | | CGUGAC | | | | | |
| AB037926.1 | AB037926_162 | CGACCGCGUCCCG | 309 | CCCGAAGGCG | 404 | CGAGGUUAAG | 499 |
| | _232 | AAGGCGGGUACCC | | GGUACCCGAG | | GGCCAAUUCG | |
| | | GAGGUGAGUUUAC | | GU(5') | | GGCU(3') | |
| | | ACACCGAGGUUAA | | | | | |
| | | GGGCCAAUUCGGG | | | | | |
| | | CUUGG | | | | | |
| AB037926.1 | AB037926_345 | CGCGGUAUCGUAG | 310 | UAUCGUAGCC | 405 | GGGCCCCCGC | 500 |
| | 4_3513 | CCGACGCGGACCC | | GACGCGGACC | | GGGGCUCUCG | |
| | | CGUUUUCGGGGCC | | CCG(5') | | GCG(3') | |
| | | CCCGCGGGGCUCU | | | | | |
| | | CGGCGCG | | | | | |
| AB037926.1 | AB037926_353 | CGCCAUUUUGUGA | 311 | AUUUUGUGAU | 406 | GCGGGGCGUG | 501 |
| | 1_3609 | UACGCGCGUCCCC | | ACGCGCGUCC | | GCCGUAUCAG | |
| | | UCCCGGCUUCCGU | | CCUCCC(5') | | AAAAUGG(3') | |
| | | ACAACGUCAGGCG | | | | | |
| | | GGGCGUGGCCGUA | | | | | |
| | | UCAGAAAAUGGCG | | | | | |
| AB037926.1 | AB037926_363 | GCUACGUCAUAAG | 312 | AAGUCACGUG | 407 | CCUCGGUCAC | 502 |
| | 7_3714 | UCACGUGACUGGG | | ACUGGGCAGG | | GUGGCCUGU(3') | |
| | | CAGGUACUAAACC | | U(5') | | | |
| | | CGGAAGUAUCCUC | | | | | |
| | | GGUCACGUGGCCU | | | | | |
| | | GUCACGUAGUUG | | | | | |
| AB038621.1 | AB038621_351 | GGCUSUGACGUCA | 313 | UGACGUCAAA | 408 | CCUCGUCACG | 503 |
| | 1_3591 | AAGUCACGUGGGR | | GUCACGUGGG | | UGACCUGACG | |
| | | AGGGUGGCGUUAA | | RA000U(5') | | UCACAG(3') | |
| | | ACCCGGAAGUCAU | | | | | |
| | | CCUCGUCACGUGA | | | | | |
| | | CCUGACGUCACAG | | | | | |
| | | CC | | | | | |
| AB038622.1 | AB038622_227 | GCCCGUCCGCGGC | 314 | GAUCGAGCGU | 409 | CCGUCCGCGG | 504 |
| | _293 | GAGAGCGCGAGCG | | CCCGUGGGCG | | CGAGAGCGCG | |
| | | AAGCGAGCGAUCG | | GGU(3') | | AGCGA(5') | |
| | | AGCGUCCCGUGGG | | | | | |
| | | CGGGUGCCGAAGG | | | | | |
| | | U | | | | | |
| AB038622.1 | AB038622_351 | GGUUGUGACGUCA | 315 | UGACGUCAAA | 410 | AUCCUCGUCA | 505 |
| | 0_3591 | AAGUCACGUGGGG | | GUCACGUGGG | | CGUGACCUGA | |
| | | AGGGCGGCGUUAA | | GA000CGG(5') | | CGUCACG(3') | |
| | | ACCCGGAAGUCAU | | | | | |
| | | CCUCGUCACGUGA | | | | | |
| | | CCUGACGUCACGG | | | | | |
| | | CC | | | | | |
| AB038623.1 | AB038623_228 | GCCCGUCCGCGGC | 316 | GAUCGAGCGU | 411 | CCGUCCGCGG | 506 |
| | _295 | GAGAGCGCGAGCG | | CCCGUGGGCG | | CGAGAGCGCG | |
| | | AAGCGAGCGAUCG | | GGU(3') | | AGCGA(5') | |
| | | AGCGUCCCGUGGG | | | | | |
| | | CGGGUGCCGUAGG | | | | | |
| | | UG | | | | | |
| AB038624.1 | AB038624_228 | GCCCGUCCGCGGC | 317 | GAUCGAGCGU | 412 | CCGUCCGCGG | 507 |
| | _295 | GAGAGCGCGAGCG | | CCCGUGGGCG | | CGAGAGCGCG | |
| | | AAGCGAGCGAUCG | | GGU(3') | | AGCGA(5') | |
| | | AGCGUCCCGUGGG | | | | | |
| | | CGGGUGCCGUAGG | | | | | |
| | | UG | | | | | |
| AB038624.1 | AB038624_351 | GGCUGUGACGUCA | 318 | UGACGUCAAA | 413 | AUCCUCGUCA | 508 |
| | 1_3592 | AAGUCACGUGGGG | | GUCACGUGGG | | CGUGACCUGA | |
| | | AGGGCGGCGUUAA | | GA000CGG(5') | | CGUCACG(3') | |
| | | ACCCGGAAGUCAU | | | | | |
| | | CCUCGUCACGUGA | | | | | |
| | | CCUGACGUCACGG | | | | | |
| | | CC | | | | | |
| AB041957.1 | AB041957_341 | AGACCACGUGGUA | 319 | ACGUGGUAAG | 414 | CUGACCCGCG | 509 |
| | 4_3493 | AGUCACGUGGGGG | | UCACGUGGGG | | UGACUGGUCA | |
| | | CAGCUGCUGUAAA | | GCAGCU(5') | | CGUGA(3') | |
| | | CCCGGAAGUAGCU | | | | | |
| | | GACCCGCGUGACU | | | | | |
| | | GGUCACGUGACCU | | | | | |
| | | G | | | | | |
| AB049608.1 | AB049608_319 | CGCCAUUUUAUAA | 320 | AUUUUAUAAU | 415 | CGGGGCGUGG | 510 |
| | 9_3277 | UACGCGCGUCCCC | | ACGCGCGUCC | | CCGUAUUAGA | |
| | | UCCCGGCUUCCGU | | CCUCC(5') | | AAAUGG(3') | |
| | | ACUACGUCAGGCG | | | | | |
| | | GGGCGUGGCCGUA | | | | | |
| | | UUAGAAAAUGGUG | | | | | |
| AB050448.1 | AB050448_339 | UAAGUAAGGCGGA | 321 | AAGGGACAGC | 416 | AGUAAGGCGG | 511 |
| | 3_3465 | ACCAGGCUGUCAC | | CUUCCGGCUU | | AACCAGGCUG | |
| | | CCUGUGUCAAAGG | | GC(3') | | UCACCCUGU(5') | |
| | | UCAAGGGACAGCC | | | | | |
| | | UUCCGGCUUGCAC | | | | | |
| | | AAAAUGG | | | | | |
| AB054647.1 | AB054647_353 | UGCCUACGUCAUA | 322 | CAUAAGUCAC | 417 | UAGCUGACCC | 512 |
| | 7_3615 | AGUCACGUGGGGA | | GUGGGGACGG | | GCGUGACUUG | |
| | | CGGCUGCUGUAAA | | CUGCU(5') | | UCAC(3') | |
| | | CACGGAAGUAGCU | | | | | |
| | | GACCCGCGUGACU | | | | | |
| | | UGUCACGUGAGCA | | | | | |
| AB054648.1 | AB054648_343 | UUGUGUAAGGCGG | 323 | UAAGGCGGAA | 418 | GGUCAGCCUC | 513 |
| | 9_3511 | AACAGGCUGACAC | | CAGGCUGACA | | CGCUUUGCA(3') | |
| | | CCCGUGUCAAAGG | | CCCC(5') | | | |
| | | UCAGGGGUCAGCC | | | | | |
| | | UCCGCUUUGCACC | | | | | |
| | | AAAUGGU | | | | | |
| AB054648.1 | AB054648_353 | UACCUACGUCAUAA | 324 | UACGUCAUAA | 419 | GCUGACCCGC | 514 |
| | 8_3617 | GUCACGUGGGAAG | | GUCACGUGGG | | GUGGCUUGUC | |
| | | AGCUGCUGUGAAC | | AAGAGCUG(5') | | ACGUGAGU(3') | |
| | | CUGGAAGUAGCUG | | | | | |
| | | ACCCGCGUGGCUU | | | | | |
| | | GUCACGUGAGUGC | | | | | |
| AB064595.1 | AB064595_116 | UUUUCCUGGCCCG | 325 | UCGGGCGUCC | 420 | GGCCCGUCCG | 515 |
| | _191 | UCCGCGGCGAGAG | | CGAGGGCGGG | | CGGCGAGAGC | |
| | | CGCGAGCGAAGCG | | UG(3') | | GCGAG(5') | |
| | | AGCGAUCGGGCGU | | | | | |
| | | CCCGAGGGCGGGU | | | | | |
| | | GCCGGAGGUG | | | | | |
| AB064595.1 | AB064595_328 | AAAGUGAGUGGGG | 326 | AAAGUGAGUG | 421 | UCCGGGUGCG | 516 |
| | 3_3351 | CCAGACUUCGCCA | | GGGCCAGACU | | UCUGGGGGCC | |
| | | UAGGGCCUUUAAC | | UCGCC(5') | | GCCAUUU(3') | |
| | | UUCCGGGUGCGUC | | | | | |
| | | UGGGGGCCGCCAU | | | | | |
| | | UUU | | | | | |
| AB064595.1 | AB064595_342 | GUGACGUUACUCU | 327 | CUCUCACGUG | 422 | AUCCUCGACC | 517 |
| | 7_3500 | CACGUGAUGGGGG | | AUGGGGGCGU | | ACGUGACUGU | |
| | | CGUGCUCUAACCC | | CC(S) | | G(3') | |
| | | GGAAGCAUCCUCG | | | | | |
| | | ACCACGUGACUGU | | | | | |
| | | GACGUCAC | | | | | |
| AB064595.1 | AB064595_41_ | AGCGUCUACUACG | 328 | UCUACUACGU | 423 | AUAAACCAGA | 518 |
| | 116 | UACACUUCCUGGG | | ACACUUCCUG | | GGGGUGACGA | |
| | | GUGUGUCCUGCCA | | GGGUGUGU(5') | | AUGGUAGAGU | |
| | | CUGUAUAUAAACCA | | | | (3') | |
| | | GAGGGGUGACGAA | | | | | |
| | | UGGUAGAGU | | | | | |
| AB064596.1 | AB064596_342 | GUGACGUCAAAGU | 329 | UGGCUGUUGU | 424 | CAAAGUCACG | 519 |
| | 4_3497 | CACGUGGUGACGG | | CACGUGACUU | | UGGUGACGGC | |
| | | CCAUUUUAACCCG | | GA(3') | | CAU(5') | |
| | | GAAGUGGCUGUUG | | | | | |
| | | UCACGUGACUUGA | | | | | |
| | | CGUCACGG | | | | | |
| AB064597.1 | AB064597_319 | GCUUUAGACGCCA | 330 | AGACGCCAUU | 425 | GUAGGCGCGU | 520 |
| | 1_3253 | UUUUAGGCCCUCG | | UUAGGCCCUC | | UUUAAUGACG | |
| | | CGGGCACCCGUAG | | GCGG(5') | | UCACGG(3') | |
| | | GCGCGUUUUAAUG | | | | | |
| | | ACGUCACGGC | | | | | |
| AB064597.1 | AB064597_322 | CACCCGUAGGCGC | 331 | UGUCGUGACG | 426 | UAGGCGCGUU | 521 |
| | 1_3294 | GUUUUAAUGACGU | | UUUGAGACAC | | UUAAUGACGU | |
| | | CACGGCAGCCAUU | | GUGAU(3') | | CACGGCAG(5') | |
| | | UUGUCGUGACGUU | | | | | |
| | | UGAGACACGUGAU | | | | | |
| | | GGGGGCGU | | | | | |
| AB064597.1 | AB064597_326 | GUCGUGACGUUUG | 332 | UGACGUUUGA | 427 | AUCCCUGGUC | 522 |
| | 2_3342 | AGACACGUGAUGG | | GACACGUGAU | | ACGUGACUCU | |
| | | GGGCGUGCCUAAA | | GGGGGCGUGC | | GACGUCACG(3') | |
| | | CCCGGAAGCAUCC | | (5') | | | |
| | | CUGGUCACGUGAC | | | | | |
| | | UCUGACGUCACGG | | | | | |
| | | CG | | | | | |
| AB064598.1 | AB064598_317 | CGAAAGUGAGUGG | 333 | AGUGAGUGGG | 428 | GCGUGUGGGG | 523 |
| | 9_3256 | GGCCAGACUUCGC | | GCCAGACUUC | | GCCGCCAUUU | |
| | | CAUAAGGCCUUUA | | CC(S) | | UAGCUU(3') | |
| | | ACUUCCGGGUGCG | | | | | |
| | | UGUGGGGGCCGCC | | | | | |
| | | AUUUUAGCUUCG | | | | | |
| AB064598.1 | AB064598_332 | CUGUGACGUCAAA | 334 | UGUGACGUCA | 429 | UCAUCCUCGU | 524 |
| | 3_3399 | GUCACGUGGGGAG | | AAGUCACGUG | | CACGUGACCU | |
| | | GGCGGCGUGUAAC | | GGGAGGGCGG | | GACGUCACG(3') | |
| | | CCGGAAGUCAUCC | | (5') | | | |
| | | UCGUCACGUGACC | | | | | |
| | | UGACGUCACGG | | | | | |
| AB064598.1 | AB064598_341 | CUGUCCGCCAUCU | 335 | AAAAGAGGAA | 430 | CGCCAUCUUG | 525 |
| | 2_3485 | UGUGACUUCCUUC | | GUAUGACGUA | | UGACUUCCUU | |
| | | CGCUUUUUCAAAAA | | GCGGCGG(3') | | CCGCUUUUU(5') | |
| | | AAAAGAGGAAGUAU | | | | | |
| | | GACGUAGCGGCGG | | | | | |
| | | GGGGGC | | | | | |
| AB064599.1 | AB064599_108 | GGUAGAGUUUUUU | 336 | AGCGAGCGGC | 431 | UAGAGUUUUU | 526 |
| | _175 | CCGCCCGUCCGCA | | CGAGCGACCC | | UCCGCCCGUC | |
| | | GCGAGGACGCGAG | | G(3') | | CC(S) | |
| | | CGCAGCGAGCGGC | | | | | |
| | | CGAGCGACCCGUG | | | | | |
| | | GG | | | | | |
| AB064599.1 | AB064599_338 | GCUGUGACGUUUC | 337 | UUCAGUCACG | 432 | GUCCCUGGUC | 527 |
| | 9_3469 | AGUCACGUGGGGA | | UGGGGAGGGA | | ACGUGAUUGU | |
| | | GGGAACGCCUAAA | | ACGC(5') | | GAC(3') | |
| | | CCCGGAAGCGUCC | | | | | |
| | | CUGGUCACGUGAU | | | | | |
| | | UGUGACGUCACGG | | | | | |
| | | CC | | | | | |
| AB064599.1 | AB064599_348 | CCGCCAUUUUGUG | 338 | AAAAGAGGAA | 433 | CAUUUUGUGA | 528 |
| | 3_3546 | ACUUCCUUCCGCU | | GUGUGACGUA | | CUUCCUUCCG | |
| | | UUUUCAAAAAAAAA | | GCGG(3') | | CUUUUU(5') | |
| | | GAGGAAGUGUGAC | | | | | |
| | | GUAGCGGCGG | | | | | |
| AB064600.1 | AB064600_337 | GACUGUGACGUCA | 339 | UGUGACGUCA | 434 | UCAUCCUCGU | 529 |
| | 8_3456 | AAGUCACGUGGGG | | AAGUCACGUG | | CACGUGACCU | |
| | | AGGGCGGCGUGUA | | GGGAGGGCGG | | GACGUCACG(3') | |
| | | ACCCGGAAGUCAU | | (5') | | | |
| | | CCUCGUCACGUGA | | | | | |
| | | CCUGACGUCACGG | | | | | |
| AB064600.1 | AB064600_346 | CUGUCCGCCAUCU | 340 | AAAAGAGGAA | 435 | CCGCCAUCUU | 530 |
| | 9_3542 | UGUGACUUCCUUC | | GUAUGACGUG | | GUGACUUCCU | |
| | | CGCUUUUUCAAAAA | | GCGG(3') | | UCCGCUUUUU | |
| | | AAAAGAGGAAGUAU | | | | (5') | |
| | | GACGUGGCGGCGG | | | | | |
| | | GGGGGC | | | | | |
| AB064601.1 | AB064601_331 | GGUUGUGACGUCA | 341 | UGACGUCAAA | 436 | AUCCUCGUCA | 531 |
| | 8_3398 | AAGUCACGUGGGG | | GUCACGUGGG | | CGUGACCUGA | |
| | | AGGGCGGCGUGUA | | GAGGGCGG(5') | | CGUCACG(3') | |
| | | ACCCGGAAGUCAU | | | | | |
| | | CCUCGUCACGUGA | | | | | |
| | | CCUGACGUCACGG | | | | | |
| | | CC | | | | | |
| AB064601.1 | AB064601_341 | CCCGCCAUCUUGU | 342 | AAAAAAGAGG | 437 | CGCCAUCUUG | 532 |
| | 2_3477 | GACUUCCUUCCGC | | AAGUGUGACG | | UGACUUCCUU | |
| | | UUUUUCAAAAAAAA | | UAGCGGCGG | | CCGCUUUUUC | |
| | | AGAGGAAGUGUGA | | (3') | | (5') | |
| | | CGUAGCGGCGGG | | | | | |
| AB064602.1 | AB064602_125 | GCCCGUCCGCGGC | 343 | GAUCGAGCGU | 438 | CCGUCCGCGG | 533 |
| | _192 | GAGAGCGCGAGCG | | CCCGUGGGCG | | CGAGAGCGCG | |
| | | AAGCGAGCGAUCG | | GGU(3') | | AGCGA(5') | |
| | | AGCGUCCCGUGGG | | | | | |
| | | CGGGUGCCGUAGG | | | | | |
| | | UG | | | | | |
| AB064602.1 | AB064602_336 | GACUGUGACGUCA | 344 | UGUGACGUCA | 439 | UCAUCCUCGU | 534 |
| | 8_3446 | AAGUCACGUGGGG | | AAGUCACGUG | | CACGUGACCU | |
| | | AGGAGGGCGUGUA | | GGGAGGAGGG | | GACGUCACG(3') | |
| | | ACCCGGAAGUCAU | | (5') | | | |
| | | CCUCGUCACGUGA | | | | | |
| | | CCUGACGUCACGG | | | | | |
| AB064603.1 | AB064603_338 | UCGCGUCUUAGUG | 345 | UUGGUCCUGA | 440 | CUUAGUGACG | 535 |
| | 5_3447 | ACGUCACGGCAGC | | CGUCACUGUC | | UCACGGCAGC | |
| | | CAUCUUGGUCCUG | | A(3') | | CAU(5') | |
| | | ACGUCACUGUCAC | | | | | |
| | | GUGGGGAGGG | | | | | |
| AB064603.1 | AB064603_342 | UGACGUCACUGUC | 346 | CGUCACUGUC | 441 | GUCCCUGGUC | 536 |
| | 2_3498 | ACGUGGGGAGGGA | | ACGUGGGGAG | | ACGUGACAUG | |
| | | ACACGUGAACCCG | | GGAACAC(5') | | ACGUC(3') | |
| | | GAAGUGUCCCUGG | | | | | |
| | | UCACGUGACAUGA | | | | | |
| | | CGUCACGGCCG | | | | | |
| AB064604.1 | AB064604_343 | CGCCAUUUUAAGU | 347 | UAAGUAAGCA | 442 | CACAGCCGGU | 537 |
| | 6_3514 | AAGCAUGGCGGGC | | UGGCGGGCGG | | CAUGCUUGCA | |
| | | GGUGAUGUCAAAU | | UGAU(5') | | CAAA(3') | |
| | | GUUAAAGGUCACA | | | | | |
| | | GCCGGUCAUGCUU | | | | | |
| | | GCACAAAAUGGCG | | | | | |
| AB064605.1 | AB064605_344 | CGCCAUUUUAAGU | 348 | AAGUAAGCAU | 443 | ACAGCCUGUC | 538 |
| | 0_3518 | AAGCAUGGCGGGC | | GGCGGGCGGU | | AUGCUUGCAC | |
| | | GGUGACGUGCAAU | | GA(S) | | AA(3') | |
| | | GUCAAAGGUCACA | | | | | |
| | | GCCUGUCAUGCUU | | | | | |
| | | GCACAAAAUGGCG | | | | | |
| AB064606.1 | AB064606_337 | CCAUCUUAAGUAG | 349 | UAAGUAGUUG | 444 | CACCAUCAGC | 539 |
| | 7_3449 | UUGAGGCGGACGG | | AGGCGGACGG | | CACACCUACU | |
| | | UGGCGUCGGUUCA | | UGGC(5') | | CAAA(3') | |
| | | AAGGUCACCAUCA | | | | | |
| | | GCCACACCUACUC | | | | | |
| | | AAAAUGG | | | | | |
| AB064607.1 | AB064607_350 | GCCUGUCAUGCUU | 350 | UCAUGCUUGC | 445 | CGGGUCGCCG | 540 |
| | 2_3569 | GCACAAAAUGGCG | | ACAAAAUGGC | | CCAUAUUUGG | |
| | | GACUUCCGCUUCC | | GGACUUCCG | | UCACGUGA(3') | |
| | | GGGUCGCCGCCAU | | (5') | | | |
| | | AUUUGGUCACGUG | | | | | |
| | | AC | | | | | |
| AF079173.1 | AF079173_347 | GCCAUUUUAAGUA | 351 | AGUAGCUGAC | 446 | CAUCCUCGGC | 541 |
| | 5_3551 | GCUGACGUCAAGG | | GUCAAGGAUU | | GGAAGCUACA | |
| | | AUUGACGUAAAGG | | GAC(5') | | CAA(3') | |
| | | UUAAAGGUCAUCC | | | | | |
| | | UCGGCGGAAGCUA | | | | | |
| | | CACAAAAUGGU | | | | | |
| AF116842.1 | AF116842_347 | GCCAUUUUAAGUA | 352 | AGUAGCUGAC | 447 | CAUCCUCGGC | 542 |
| | 5_3551 | GCUGACGUCAAGG | | GUCAAGGAUU | | GGAAGCUACA | |
| | | AUUGACGUAAAGG | | GAC(5') | | CAA(3') | |
| | | UAAAGGUCAUCC | | | | | |
| | | UCGGCGGAAGCUA | | | | | |
| | | CACAAAAUGGU | | | | | |
| AF116842.1 | AF116842_357 | GCAUACGUCACAA | 353 | ACAAGUCACG | 448 | GGCCCCGUCA | 543 |
| | 9_3657 | GUCACGUGGGGGG | | UGGGGGGGAC | | CGUGACUUAC | |
| | | GACCCGCUGUAAC | | CCG(5') | | CAC(3') | |
| | | CCGGAAGUAGGCC | | | | | |
| | | CCGUCACGUGACU | | | | | |
| | | UACCACGUGUGUA | | | | | |
| AF122913.1 | AF122913_347 | GCCAUUUUAAGUA | 354 | AAGUAGCUGA | 449 | UCAUCCUCGG | 544 |
| | 5_3551 | GCUGACGUCAAGG | | CGUCAAGGAU | | CGGAAGCUAC | |
| | | AUUGACGUGAAGG | | UGACG(5') | | ACAA(3') | |
| | | UUAAAGGUCAUCC | | | | | |
| | | UCGGCGGAAGCUA | | | | | |
| | | CACAAAAUGGU | | | | | |
| AF122913.1 | AF122913_357 | GCACACGUCAUAA | 355 | AUAAGUCACG | 450 | GGCCCCGUCA | 545 |
| | 9_3657 | GUCACGUGGUGGG | | UGGUGGGGAC | | CGUGAUUUGU | |
| | | GACCCGCUGUAAC | | CCG(5') | | CAC(3') | |
| | | CCGGAAGUAGGCC | | | | | |
| | | CCGUCACGUGAUU | | | | | |
| | | UGUCACGUGUGUA | | | | | |
| AF122914.1 | AF122914_347 | GCCAUUUUAAGUC | 356 | AAGUCAGCUC | 451 | GUCAUCCUCA | 546 |
| | 6_3552 | AGCUCUGGGGAGG | | UGGGGAGGCG | | CCAUAACUGG | |
| | | CGUGACUUCCAGU | | UGACUU(5') | | CACAA(3') | |
| | | UCAAAGGUCAUCC | | | | | |
| | | UCACCAUAACUGG | | | | | |
| | | CACAAAAUGGC | | | | | |
| AF122915.1 | AF122915_347 | GCCAUUUUAAGUA | 357 | AGUAGCUGAC | 452 | CAUCCUCGGC | 547 |
| | 5_3551 | GCUGACGUCAAGG | | GUCAAGGAUU | | GGAAGCUACA | |
| | | AUUGACGUAAAGG | | GAC(5') | | CAA(3') | |
| | | UUAAAGGUCAUCC | | | | | |
| | | UCGGCGGAAGCUA | | | | | |
| | | CACAAAAUGGU | | | | | |
| AF122915.1 | AF122915_357 | GCAUACGUCACAA | 358 | CAAGUCACGU | 453 | GGCCCCGUCA | 548 |
| | 9_3657 | GUCACGUGGAGGG | | GGAGGGGACA | | CGUGACUUAC | |
| | | GACACGCUGUAAC | | CC(S) | | CAC(3') | |
| | | CCGGAAGUAGGCC | | | | | |
| | | CCGUCACGUGACU | | | | | |
| | | UACCACGUGUGUA | | | | | |
| AF122916.1 | AF122916_345 | GCGCCAUGUUAAG | 359 | UGUUAAGUGG | 454 | AUCCUCGACG | 549 |
| | 8_3537 | UGGCUGUCGCCGA | | CUGUCGCCGA | | GUAACCGCAA | |
| | | GGAUUGACGUCAC | | GGAUUGA(5') | | ACAUG(3') | |
| | | AGUUCAAAGGUCA | | | | | |
| | | UCCUCGACGGUAA | | | | | |
| | | CCGCAAACAUGGC | | | | | |
| | | G | | | | | |
| AF122916.1 | AF122916_356 | CAUGCGUCAUAAG | 360 | UAAGUCACAU | 455 | GGCCCCGACA | 550 |
| | 5_3641 | UCACAUGACAGGG | | GACAGGGGUC | | UGUGACUCGU | |
| | | GUCCACUUAAACAC | | CA(S) | | C(3') | |
| | | GGAAGUAGGCCCC | | | | | |
| | | GACAUGUGACUCG | | | | | |
| | | UCACGUGUGU | | | | | |
| AF122916.1 | AF122916_91_ | UGGCAGCACUUCC | 361 | CGGAGAGGGA | 456 | AGCACUUCCG | 551 |
| | 164 | GAAUGGCUGAGUU | | GCCACGGAGG | | AAUGGCUGAG | |
| | | UUCCACGCCCGUC | | UG(3') | | UUUUCCA(5') | |
| | | CGCGGAGAGGGAG | | | | | |
| | | CCACGGAGGUGAU | | | | | |
| | | CCCGAACG | | | | | |
| AF122917.1 | AF122917_336 | GCCAUUUUAAGUC | 362 | AAGUCAGCGC | 457 | AUCCUCACCG | 552 |
| | 9_3447 | AGCGCUGGGGAGG | | UGGGGAGGCA | | GAACUGACAC | |
| | | CAUGACUGUAAGU | | UGA(5') | | AA(3') | |
| | | UCAAAGGUCAUCC | | | | | |
| | | UCACCGGAACUGA | | | | | |
| | | CACAAAAUGGCCG | | | | | |
| AF122918.1 | AF122918_346 | GCCAUCUUAAGUG | 363 | UCUUAAGUGG | 458 | CAUCCUCGGC | 553 |
| | 0_3540 | GCUGUCGCCGAGG | | CUGUCGCCGA | | GGUAACCGCA | |
| | | AUUGACGUCACAG | | GGAUUGAC(5') | | AAGAUG(3') | |
| | | UUCAAAGGUCAUC | | | | | |
| | | CUCGGCGGUAACC | | | | | |
| | | GCAAAGAUGGCGG | | | | | |
| | | UC | | | | | |
| AF122918.1 | AF122918_356 | AUACGUCAUAAGU | 364 | AAGUCACAUG | 459 | UAGGCCCCGA | 554 |
| | 6_3642 | CACAUGUCUAGGG | | UCUAGGGGUC | | CAUGUGACUC | |
| | | GUCCACUUAAACAC | | CACU(5') | | GU(3') | |
| | | GGAAGUAGGCCCC | | | | | |
| | | GACAUGUGACUCG | | | | | |
| | | UCACGUGUGU | | | | | |
| AF122919.1 | AF122919_337 | CCAUUUUAAGUAA | 365 | AAGUAAGGCG | 460 | ACAGCCUUCC | 555 |
| | 0_3447 | GGCGGAAGCAGCU | | GAAGCAGCUG | | GCUUUGCACA | |
| | | GUCCCUGUAACAA | | UCC(5') | | A(3') | |
| | | AAUGGCGGCGACA | | | | | |
| | | GCCUUCCGCUUUG | | | | | |
| | | CACAAAAUGGAG | | | | | |
| AF122920.1 | AF122920_346 | GCCAUCUUAAGUG | 366 | AUCUUAAGUG | 461 | CAUCCUCGGC | 556 |
| | 0_3540 | GCUGUCGCUGAGG | | GCUGUCGCUG | | GGUAACCGCA | |
| | | AUUGACGUCACAG | | AGGAUUGAC | | AAGAUGG(3') | |
| | | UUCAAAGGUCAUC | | (5') | | | |
| | | CUCGGCGGUAACC | | | | | |
| | | GCAAAGAUGGCGG | | | | | |
| | | UC | | | | | |
| AF122920.1 | AF122920_356 | CAUACGUCAUAAG | 367 | UAAGUCACAU | 462 | UAGGCCCCGA | 557 |
| | 5_3641 | UCACAUGACAGGA | | GACAGGAGUC | | CAUGUGACUC | |
| | | GUCCACUUAAACAC | | CACU(5') | | GUC(3') | |
| | | GGAAGUAGGCCCC | | | | | |
| | | GACAUGUGACUCG | | | | | |
| | | UCACGUGUGU | | | | | |
| AF122921.1 | AF122921_345 | CGCCAUCUUAAGU | 368 | AAGUGGCUGU | 463 | UCCUCGGCGG | 558 |
| | 9_3540 | GGCUGUCGCCGAG | | CGCCGAGGAU | | UAACCGCAAA | |
| | | GAUUGGCGUCACA | | UG(5') | | (3') | |
| | | GUUCAAAGGUCAU | | | | | |
| | | CCUCGGCGGUAAC | | | | | |
| | | CGCAAAGAUGGCG | | | | | |
| | | GU | | | | | |
| AF122921.1 | AF122921_356 | CAUACGUCAUAAG | 369 | UAAGUCACAU | 464 | GGCCCCGACA | 559 |
| | 5_3641 | UCACAUGACAGGG | | GACAGGGGUC | | UGUGACUCGU | |
| | | GUCCACUUAAACAC | | CA(S) | | C(3') | |
| | | GGAAGUAGGCCCC | | | | | |
| | | GACAUGUGACUCG | | | | | |
| | | UCACGUGUGU | | | | | |
| AF129887.1 | AF129887_357 | GCAUACGUCACAA | 370 | ACAAGUCACG | 465 | GGCCCCGUCA | 560 |
| | 9_3657 | GUCACGUGGGGGG | | UGGGGGGGAC | | CGUGACUUAC | |
| | | GACCCGCUGUAAC | | CCG(5') | | CAC(3') | |
| | | CCGGAAGUAGGCC | | | | | |
| | | CCGUCACGUGACU | | | | | |
| | | UACCACGUGGUGU | | | | | |
| AF247137.1 | AF247137_345 | CCGCCAUUUUAGG | 371 | AUUUUAGGCU | 466 | UCAAACACCC | 561 |
| | 3_3530 | CUGUUGCCGGGCG | | GUUGCCGGGC | | AGCGACACCA | |
| | | UUUGACUUCCGUG | | GUUUGACU(5') | | AAAAAUGG(3') | |
| | | UUAAAGGUCAAACA | | | | | |
| | | CCCAGCGACACCA | | | | | |
| | | AAAAAUGGCCG | | | | | |
| AF247137.1 | AF247137_355 | CUACGUCAUAAGU | 372 | AUAAGUCACG | 467 | CCUCGCCCAC | 562 |
| | 9_3636 | CACGUGACAGGGA | | UGACAGGGAG | | GUGACUUACC | |
| | | GGGGCGACAAACC | | COG(S) | | AC(3') | |
| | | CGGAAGUCAUCCU | | | | | |
| | | CGCCCACGUGACU | | | | | |
| | | UACCACGUGGUG | | | | | |
| AF247138.1 | AF247138_345 | GCCAUUUUAAGUA | 373 | AAGUAGGUGA | 468 | CCUCGGCGGA | 563 |
| | 5_3532 | GGUGACGUCCAGG | | CGUCCAGGAC | | ACCUAUACAA | |
| | | ACUGACGUAAAGU | | U(5') | | (3') | |
| | | UCAAAGGUCAUCC | | | | | |
| | | UCGGCGGAACCUA | | | | | |
| | | UACAAAAUGGCG | | | | | |
| AF247138.1 | AF247138_356 | CUACGUCAUAAGU | 374 | CAUAAGUCAC | 469 | GCCCCGUCAC | 564 |
| | 1_3637 | CACGUGGGGACGG | | GUGGGGACGG | | GUGAUUUACC | |
| | | CUGUACUUAAACAC | | CUGU(5') | | AC(3') | |
| | | GGAAGUAGGCCCC | | | | | |
| | | GUCACGUGAUUUA | | | | | |
| | | CCACGUGGUG | | | | | |
| AF261761.1 | AF261761_343 | GCCAUUUUAAGUA | 375 | UAAGUAAGGC | 470 | GCGGCGGAGC | 565 |
| | 1_3504 | AGGCGGAAGAGCU | | GGAAGAGCUC | | ACUUCCGCUU | |
| | | CUAGCUAUACAAAA | | UAGCUA(5') | | UGCCCAAA(3') | |
| | | UGGCGGCGGAGCA | | | | | |
| | | CUUCCGCUUUGCC | | | | | |
| | | CAAAAUG | | | | | |
| AF351132.1 | AF351132_347 | GCCAUUUUAAGUA | 376 | AGUAGCUGAC | 471 | CAUCCUCGGC | 566 |
| | 5_3552 | GCUGACGUCAAGG | | GUCAAGGAUU | | GGAAGCUACA | |
| | | AUUGACGUAGAGG | | GAC(5') | | CAA(3') | |
| | | UUAAAGGUCAUCC | | | | | |
| | | UCGGCGGAAGCUA | | | | | |
| | | CACAAAAUGGUG | | | | | |
| AF351132.1 | AF351132_357 | GCAUACGUCACAA | 377 | ACAAGUCACG | 472 | GGCCCCGUCA | 567 |
| | 9_3657 | GUCACGUGGGGGG | | UGGGGGGGAC | | CGUGACUUAC | |
| | | GACCCGCUGUAAC | | CCG(5') | | CAC(3') | |
| | | CCGGAAGUAGGCC | | | | | |
| | | CCGUCACGUGACU | | | | | |
| | | UACCACGUGUGUA | | | | | |
| AF435014.1 | AF435014_334 | GGCGCCAUUUUAA | 378 | UAAGUAAGCA | 473 | CACCGCACUU | 568 |
| | 4_3426 | GUAAGCAUGGCGG | | UGGCGGGCGG | | CCGUGCUUGC | |
| | | GCGGCGACGUCAC | | CGAC(5') | | ACAAA(3') | |
| | | AUGUCAAAGGUCA | | | | | |
| | | CCGCACUUCCGUG | | | | | |
| | | CUUGCACAAAAUG | | | | | |
| | | GC | | | | | |
| AF435014.1 | AF435014_345 | UGCUACGUCAUCG | 379 | AUCGAGACAC | 474 | UCGCUGACAC | 569 |
| | 3_3526 | AGACACGUGGUGC | | GUGGUGCCAG | | ACGUGUCUUG | |
| | | CAGCAGCUGUAAA | | CAGCU(5') | | UCAC(3') | |
| | | CCCGGAAGUCGCU | | | | | |
| | | GACACACGUGUCU | | | | | |
| | | UGUCACGU | | | | | |
| AJ620212.1 | AJ620212_336 | GCCAUUUUAAGUA | 380 | UCAUCCUCAG | 475 | CAUUUUAAGU | 570 |
| | 0_3438 | AGCACCGCCUAGG | | CCGGAACUUA | | AAGCACCGCC | |
| | | GAUGACGUAUAAG | | CACAAAAUGG | | UAGGGAUGAC | |
| | | UUCAAAGGUCAUC | | (3') | | (5') | |
| | | CUCAGCCGGAACU | | | | | |
| | | UACACAAAAUGGU | | | | | |
| AJ620212.1 | AJ620212_347 | ACGUCAUAUGUCA | 381 | AUAUGUCACG | 476 | GUAGGCCCCG | 571 |
| | 0_3542 | CGUGGGGAGGCCC | | UGGGGAGGCC | | UCACGUGUCA | |
| | | UGCUGCGCAAACG | | CUGCUG(5') | | UACCAC(3') | |
| | | CGGAAGUAGGCCC | | | | | |
| | | CGUCACGUGUCAU | | | | | |
| | | ACCACGU | | | | | |
| AJ620218.1 | AJ620218_338 | CCAUUUUAAGUAA | 382 | AAGUAAGGCG | 477 | GGCGGGGCAC | 572 |
| | 1_3458 | GGCGGAAGCAGCU | | GAAGCAGCUC | | UUCCGGCUUG | |
| | | CCACUUUCUCACAA | | CACUUU(5') | | CCCAA(3') | |
| | | AAUGGCGGCGGGG | | | | | |
| | | CACUUCCGGCUUG | | | | | |
| | | CCCAAAAUGGC | | | | | |
| AJ620226.1 | AJ620226_345 | CCAUUUUAAGUAA | 383 | AAGUAAGGCG | 478 | CGGCGGAGCA | 573 |
| | 1_3523 | GGCGGAAGUUUCU | | GAAGUUUCUC | | CUUCCGGCUU | |
| | | CCACUAUACAAAAU | | CACU(5') | | GCCCAA(3') | |
| | | GGCGGCGGAGCAC | | | | | |
| | | UUCCGGCUUGCCC | | | | | |
| | | AAAAUG | | | | | |
| AJ620227.1 | AJ620227_337 | CCAUCUUAAGUAG | 384 | UAAGUAGUUG | 479 | CACCAUCAGC | 574 |
| | 9_3451 | UUGAGGCGGACGG | | AGGCGGACGG | | CACACCUACU | |
| | | UGGCGUGAGUUCA | | UGGC(5') | | CAAA(3') | |
| | | AAGGUCACCAUCA | | | | | |
| | | GCCACACCUACUC | | | | | |
| | | AAAAUGG | | | | | |
| AJ620231.1 | AJ620231_342 | CGCCAUCUUAAGU | 385 | UAAGUAGUUG | 480 | ACCAUCAGCC | 575 |
| | 9_3505 | AGUUGAGGCGGAC | | AGGCGGACGG | | ACACCUACUC | |
| | | GGUGGCGUGAGUU | | UGG(5') | | AAA(3') | |
| | | CAAAGGUCACCAU | | | | | |
| | | CAGCCACACCUAC | | | | | |
| | | UCAAAAUGGUG | | | | | |
| AY666122.1 | AY666122_316 | UUUCGGACCUUCG | 386 | GACCUUCGGC | 481 | GACUCCGAGA | 576 |
| | 3_3236 | GCGUCGGGGGGGU | | GUCGGGGGG | | UGCCAUUGGA | |
| | | CGGGGGCUUUACU | | GUCGGGGG(5') | | CACUGAGG(3') | |
| | | AAACAGACUCCGA | | | | | |
| | | GAUGCCAUUGGAC | | | | | |
| | | ACUGAGGG | | | | | |
| AY666122.1 | AY666122_338 | CCAUUUUAAGUAG | 387 | AUCCUCGGCG | 482 | AGUAGGUGCC | 577 |
| | 8_3464 | GUGCCGUCCAGCA | | GAACCUAUA | | GUCCAGCA(5') | |
| | | CUGCUGUUCCGGG | | (3') | | | |
| | | UUAAAGGGCAUCC | | | | | |
| | | UCGGCGGAACCUA | | | | | |
| | | UACAAAAUGGC | | | | | |
| AY666122.1 | AY666122_349 | CUACGUCAUCGAU | 388 | AUCGAUGACG | 483 | AAGUAGGCCC | 578 |
| | 4_3567 | GACGUGGGGAGGC | | UGGGGAGGCG | | CGCUACGUCA | |
| | | GUACUAUGAAACG | | UACUAU(5') | | UCAUCAC(3') | |
| | | CGGAAGUAGGCCC | | | | | |
| | | CGCUACGUCAUCA | | | | | |
| | | UCACGUGG | | | | | |
| AY823988.1 | AY823988_345 | CCAUUUUAAGUAA | 389 | UGGCGGAGGA | 484 | AAGGCGGAAG | 579 |
| | 2_3525 | GGCGGAAGAGCUG | | GCACUUCCGG | | AGCUGCUCUA | |
| | | CUCUAUAUACAAAA | | CUUG(3') | | UAU(5') | |
| | | UGGCGGAGGAGCA | | | | | |
| | | CUUCCGGCUUGCC | | | | | |
| | | CAAAAUG | | | | | |
| AY823988.1 | AY823988_355 | UGCCUACGUAACA | 390 | AACAAGUCAC | 485 | CAAUCCUCCC | 580 |
| | 4_3629 | AGUCACGUGGGGA | | GUGGGGAGGG | | ACGUGGCCUG | |
| | | GGGUUGGCGUAUA | | UUGGC(5') | | UCAC(3') | |
| | | ACCCGGAAGUCAA | | | | | |
| | | UCCUCCCACGUGG | | | | | |
| | | CCUGUCACGU | | | | | |
| AY823989.1 | AY823989_355 | UAAGUAAGGCGGA | 391 | AGGGGUCAGC | 486 | AAGGCGGAAC | 581 |
| | 1_3623 | ACCAGGCUGUCAC | | CUUCCGCUUU | | CAGGCUGUCA | |
| | | CCCGUGUCAAAGG | | A(3') | | CCCCGU(5') | |
| | | UCAGGGGUCAGCC | | | | | |
| | | UUCCGCUUUACAC | | | | | |
| | | AAAAUGG | | | | | |
| AY823989.1 | AY823989_355 | UAAGUAAGGCGGA | 392 | AGGGGUCAGC | 487 | AAGGCGGAAC | 582 |
| | 1_3623 | ACCAGGCUGUCAC | | CUUCCGCUUU | | CAGGCUGUCA | |
| | | CCCGUGUCAAAGG | | A(3') | | CCCCGU(5') | |
| | | UCAGGGGUCAGCC | | | | | |
| | | UUCCGCUUUACAC | | | | | |
| | | AAAAUGG | | | | | |
| DQ361268.1 | DQ361268_341 | GCAGCCAUUUUAA | 393 | UAAGUCAGCU | 488 | CAUCCUCACC | 583 |
| | 3_3494 | GUCAGCUUCGGGG | | UCGGGGAGGG | | GGAACUGGUA | |
| | | AGGGUCACGCAAA | | UCAC(5') | | CAAA(3') | |
| | | GUUCAAAGGUCAU | | | | | |
| | | CCUCACCGGAACU | | | | | |
| | | GGUACAAAAUGGC | | | | | |
| | | CG | | | | | |
| DQ361268.1 | DQ361268_351 | UGCUACGUCAUAA | 394 | UCAUAAGUGA | 489 | UAGGCCCCGC | 584 |
| | 9_3593 | GUGACGUAGCUGG | | CGUAGCUGGU | | CACGUCACUU | |
| | | UGUCUGCUGUAAA | | GUCUGCU(5') | | GUCACG(3') | |
| | | CACGGAAGUAGGC | | | | | |
| | | CCCGCCACGUCAC | | | | | |
| | | UUGUCACGU | | | | | |

[0432] siRNAs and shRNAs resemble intermediates in the processing pathway of the endogenous microRNA (miRNA) genes (Bartel, Cell 116:281-297, 2004). In some embodiments, siRNAs can function as miRNAs and vice versa (Zeng et al., Mol Cell 9:1327-1333, 2002; Doench et al., Genes Dev 17:438-442, 2003). MicroRNAs, like siRNAs, use RISC to downregulate target genes, but unlike siRNAs, most animal miRNAs do not cleave the mRNA. Instead, miRNAs reduce protein output through translational suppression or polyA removal and mRNA degradation (Wu et al., Proc Natl Acad Sci USA 103:4034-4039, 2006). Known miRNA binding sites are within mRNA 3′ UTRs; miRNAs seem to target sites with near-perfect complementarity to nucleotides 2-8 from the miRNA's 5′ end (Rajewsky, Nat Genet 38 Suppl:S8-13, 2006; Lim et al., Nature 433:769-773, 2005). This region is known as the seed region. Because siRNAs and miRNAs are interchangeable, exogenous siRNAs downregulate mRNAs with seed complementarity to the siRNA (Birmingham et al., Nat Methods 3:199-204, 2006. Multiple target sites within a 3′ UTR give stronger downregulation (Doench et al., Genes Dev 17:438-442, 2003).

[0433] Lists of known miRNA sequences can be found in databases maintained by research organizations, such as Wellcome Trust Sanger Institute, Penn Center for Bioinformatics, Memorial Sloan Kettering Cancer Center, and European Molecule Biology Laboratory, among others. Known effective siRNA sequences and cognate binding sites are also well represented in the relevant literature. RNAi molecules are readily designed and produced by technologies known in the art. In addition, there are computational tools that increase the chance of finding effective and specific sequence motifs (Lagana et al., Methods Mol. Bio., 2015, 1269:393-412).

[0434] The regulatory nucleic acid may modulate expression of RNA encoded by a gene. Because multiple genes can share some degree of sequence homology with each other, in some embodiments, the regulatory nucleic acid can be designed to target a class of genes with sufficient sequence homology. In some embodiments, the regulatory nucleic acid can contain a sequence that has complementarity to sequences that are shared amongst different gene targets or are unique for a specific gene target. In some embodiments, the regulatory nucleic acid can be designed to target conserved regions of an RNA sequence having homology between several genes thereby targeting several genes in a gene family (e.g., different gene isoforms, splice variants, mutant genes, etc.). In some embodiments, the regulatory nucleic acid can be designed to target a sequence that is unique to a specific RNA sequence of a single gene.

[0435] In some embodiments, the genetic element may include one or more sequences that encode regulatory nucleic acids that modulate expression of one or more genes.

[0436] In one embodiment, the gRNA described elsewhere herein are used as part of a CRISPR system for gene editing. For the purposes of gene editing, the curon may be designed to include one or multiple guide RNA sequences corresponding to a desired target DNA sequence; see, for example, Cong et al. (2013) Science, 339:819-823; Ran et al. (2013) Nature Protocols, 8:2281-2308. At least about 16 or 17 nucleotides of gRNA sequence generally allow for Cas9-mediated DNA cleavage to occur; for Cpf1 at least about 16 nucleotides of gRNA sequence is needed to achieve detectable DNA cleavage.

[0437] Therapeutic Peptides or Polypeptides

[0438] In some embodiments, the genetic element comprises a sequence that encodes a therapeutic peptide or polypeptide. Such therapeutics include, but are not limited to, small peptides, peptidomimetics (e.g., peptoids), amino acids, and amino acid analogs. Such therapeutics generally have a molecular weight less than about 5,000 grams per mole, a molecular weight less than about 2,000 grams per mole, a molecular weight less than about 1,000 grams per mole, a molecular weight less than about 500 grams per mole, and salts, esters, and other pharmaceutically acceptable forms of such compounds. Such therapeutics may include, but are not limited to, a neurotransmitter, a hormone, a drug, a toxin, a viral or microbial particle, a synthetic molecule, and agonists or antagonists thereof.

[0439] In some embodiments, the genetic element includes a sequence encoding a peptide e.g., a therapeutic peptide. The peptides may be linear or branched. The peptide has a length from about 5 to about 500 amino acids, about 15 to about 400 amino acids, about 20 to about 325 amino acids, about 25 to about 250 amino acids, about 50 to about 150 amino acids, or any range therebetween.

[0440] Some examples of peptides include, but are not limited to, fluorescent tag or marker, antigen, peptide therapeutic, synthetic or analog peptide from naturally-bioactive peptide, agonist or antagonist peptide, anti-microbial peptide, a targeting or cytotoxic peptide, a degradation or self-destruction peptide, and degradation or self-destruction peptides. Peptides useful in the invention described herein also include antigen-binding peptides, e.g., antigen binding antibody or antibody-like fragments, such as single chain antibodies, nanobodies (see, e.g., Steeland et al. 2016. Nanobodies as therapeutics: big opportunities for small antibodies. Drug Discov Today: 21(7):1076-113). Such antigen binding peptides may bind a cytosolic antigen, a nuclear antigen, or an intra-organellar antigen.

[0441] In some embodiments, the genetic element includes a sequence encoding a protein e.g., a therapeutic protein. Some examples of therapeutic proteins may include, but are not limited to, a hormone, a cytokine, an enzyme, an antibody, a transcription factor, a receptor (e.g., a membrane receptor), a ligand, a membrane transporter, a secreted protein, a peptide, a carrier protein, a structural protein, a nuclease, or a component thereof.

[0442] In some embodiments, the composition or curon described herein includes a polypeptide linked to a ligand that is capable of targeting a specific location, tissue, or cell.

[0443] Regulatory Sequences

[0444] In some embodiments, the genetic element comprises a regulatory sequence, e.g., a promoter or an enhancer.

[0445] In some embodiments, a promoter includes a DNA sequence that is located adjacent to a DNA sequence that encodes an expression product. A promoter may be linked operatively to the adjacent DNA sequence. A promoter typically increases an amount of product expressed from the DNA sequence as compared to an amount of the expressed product when no promoter exists. A promoter from one organism can be utilized to enhance product expression from the DNA sequence that originates from another organism. For example, a vertebrate promoter may be used for the expression of jellyfish GFP in vertebrates. In addition, one promoter element can increase an amount of products expressed for multiple DNA sequences attached in tandem. Hence, one promoter element can enhance the expression of one or more products. Multiple promoter elements are well-known to persons of ordinary skill in the art.

[0446] In one embodiment, high-level constitutive expression is desired. Examples of such promoters include, without limitation, the retroviral Rous sarcoma virus (RSV) long terminal repeat (LTR) promoter/enhancer, the cytomegalovirus (CMV) immediate early promoter/enhancer (see, e.g., Boshart et al, Cell, 41:521-530 (1985)), the SV40 promoter, the dihydrofolate reductase promoter, the cytoplasmic .beta.-actin promoter and the phosphoglycerol kinase (PGK) promoter.

[0447] In another embodiment, inducible promoters may be desired. Inducible promoters are those which are regulated by exogenously supplied compounds, either in cis or in trans, including without limitation, the zinc-inducible sheep metallothionine (MT) promoter; the dexamethasone (Dex)-inducible mouse mammary tumor virus (MMTV) promoter; the T7 polymerase promoter system (WO 98/10088); the tetracycline-repressible system (Gossen et al, Proc. Natl. Acad. Sci. USA, 89:5547-5551 (1992)); the tetracycline-inducible system (Gossen et al., Science, 268:1766-1769 (1995); see also Harvey et al., Curr. Opin. Chem. Biol., 2:512-518 (1998)); the RU486-inducible system (Wang et al., Nat. Biotech., 15:239-243 (1997) and Wang et al., Gene Ther., 4:432-441 (1997)]; and the rapamycin-inducible system (Magari et al., J. Clin. Invest., 100:2865-2872 (1997); Rivera et al., Nat. Medicine. 2:1028-1032 (1996)). Other types of inducible promoters which may be useful in this context are those which are regulated by a specific physiological state, e.g., temperature, acute phase, or in replicating cells only.

[0448] In some embodiments, a native promoter for a gene or nucleic acid sequence of interest is used. The native promoter may be used when it is desired that expression of the gene or the nucleic acid sequence should mimic the native expression. The native promoter may be used when expression of the gene or other nucleic acid sequence must be regulated temporally or developmentally, or in a tissue-specific manner, or in response to specific transcriptional stimuli. In a further embodiment, other native expression control elements, such as enhancer elements, polyadenylation sites or Kozak consensus sequences may also be used to mimic the native expression.

[0449] In some embodiments, the genetic element comprises a gene operably linked to a tissue-specific promoter. For instance, if expression in skeletal muscle is desired, a promoter active in muscle may be used. These include the promoters from genes encoding skeletal α-actin, myosin light chain 2A, dystrophin, muscle creatine kinase, as well as synthetic muscle promoters with activities higher than naturally-occurring promoters. See Li et al., Nat. Biotech., 17:241-245 (1999). Examples of promoters that are tissue-specific are known for liver albumin, Miyatake et al. J. Virol., 71:5124-32 (1997); hepatitis B virus core promoter, Sandig et al., Gene Ther. 3:1002-9 (1996); alpha-fetoprotein (AFP), Arbuthnot et al., Hum. Gene Ther., 7:1503-14 (1996)], bone (osteocalcin, Stein et al., Mol. Biol. Rep., 24:185-96 (1997); bone sialoprotein, Chen et al., J. Bone Miner. Res. 11:654-64 (1996)), lymphocytes (CD2, Hansal et al., J. Immunol., 161:1063-8 (1998); immunoglobulin heavy chain; T cell receptor a chain), neuronal (neuron-specific enolase (NSE) promoter, Andersen et al. Cell. Mol. Neurobiol., 13:503-15 (1993); neurofilament light-chain gene, Piccioli et al., Proc. Natl. Acad. Sci. USA, 88:5611-5 (1991); the neuron-specific vgf gene, Piccioli et al., Neuron, 15:373-84 (1995)]; among others.

[0450] The genetic element may include an enhancer, e.g., a DNA sequence that is located adjacent to the DNA sequence that encodes a gene. Enhancer elements are typically located upstream of a promoter element or can be located downstream of or within a coding DNA sequence (e.g., a DNA sequence transcribed or translated into a product or products). Hence, an enhancer element can be located 100 base pairs, 200 base pairs, or 300 or more base pairs upstream or downstream of a DNA sequence that encodes the product. Enhancer elements can increase an amount of recombinant product expressed from a DNA sequence above increased expression afforded by a promoter element. Multiple enhancer elements are readily available to persons of ordinary skill in the art.

[0451] In some embodiments, the genetic element comprises one or more inverted terminal repeats (ITR) flanking the sequences encoding the expression products described herein. In some embodiments, the genetic element comprises one or more long terminal repeats (LTR) flanking the sequence encoding the expression products described herein. Examples of promoter sequences that may be used, include, but are not limited to, the simian virus 40 (SV40) early promoter, mouse mammary tumor virus (MMTV), human immunodeficiency virus (HIV) long terminal repeat (LTR) promoter, MoMuLV promoter, an avian leukemia virus promoter, an Epstein-Barr virus immediate early promoter, and a Rous sarcoma virus promoter.

[0452] Replication Proteins

[0453] In some embodiments, the genetic element of the curon, e.g., synthetic curon, may include sequences that encode one or more replication proteins. In some embodiments, the curon may replicate by a rolling-circle replication method, e.g., synthesis of the leading strand and the lagging strand is uncoupled. In such embodiments, the curon comprises three elements additional elements: i) a gene encoding an initiator protein, ii) a double strand origin, and iii) a single strand origin. A rolling circle replication (RCR) protein complex comprising replication proteins binds to the leading strand and destabilizes the replication origin. The RCR complex cleaves the genome to generate a free 3′OH extremity. Cellular DNA polymerase initiates viral DNA replication from the free 3′OH extremity. After the genome has been replicated, the RCR complex closes the loop covalently. This leads to the release of a positive circular single-stranded parental DNA molecule and a circular double-stranded DNA molecule composed of the negative parental strand and the newly synthesized positive strand. The single-stranded DNA molecule can be either encapsidated or involved in a second round of replication. See for example, Virology Journal 2009, 6:60 doi:10.1186/1743-422X-6-60.

[0454] The genetic element may comprise a sequence encoding a polymerase, e.g., RNA polymerase or a DNA polymerase.

[0455] Other Sequences

[0456] In some embodiments, the genetic element further includes a nucleic acid encoding a product (e.g., a ribozyme, a therapeutic mRNA encoding a protein, an exogenous gene).

[0457] In some embodiments, the genetic element includes one or more sequences that affect species and/or tissue and/or cell tropism (e.g. capsid protein sequences), infectivity (e.g. capsid protein sequences), immunosuppression/activation (e.g. regulatory nucleic acids), viral genome binding and/or packaging, immune evasion (non-immunogenicity and/or tolerance), pharmacokinetics, endocytosis and/or cell attachment, nuclear entry, intracellular modulation and localization, exocytosis modulation, propagation, and nucleic acid protection of the curon in a host or host cell.

[0458] In some embodiments, the genetic element may comprise other sequences that include DNA, RNA, or artificial nucleic acids. The other sequences may include, but are not limited to, genomic DNA, cDNA, or sequences that encode tRNA, mRNA, rRNA, miRNA, gRNA, siRNA, or other RNAi molecules. In one embodiment, the genetic element includes a sequence encoding an siRNA to target a different loci of the same gene expression product as the regulatory nucleic acid. In one embodiment, the genetic element includes a sequence encoding an siRNA to target a different gene expression product as the regulatory nucleic acid.

[0459] In some embodiments, the genetic element further comprises one or more of the following sequences: a sequence that encodes one or more miRNAs, a sequence that encodes one or more replication proteins, a sequence that encodes an exogenous gene, a sequence that encodes a therapeutic, a regulatory sequence (e.g., a promoter, enhancer), a sequence that encodes one or more regulatory sequences that targets endogenous genes (siRNA, lncRNAs, shRNA), and a sequence that encodes a therapeutic mRNA or protein.

[0460] The other sequences may have a length from about 2 to about 5000 nts, about 10 to about 100 nts, about 50 to about 150 nts, about 100 to about 200 nts, about 150 to about 250 nts, about 200 to about 300 nts, about 250 to about 350 nts, about 300 to about 500 nts, about 10 to about 1000 nts, about 50 to about 1000 nts, about 100 to about 1000 nts, about 1000 to about 2000 nts, about 2000 to about 3000 nts, about 3000 to about 4000 nts, about 4000 to about 5000 nts, or any range therebetween.

[0461] Exogenous Gene

[0462] For example, the genetic element may include a gene associated with a signaling biochemical pathway, e.g., a signaling biochemical pathway-associated gene or polynucleotide. Examples include a disease associated gene or polynucleotide. A “disease-associated” gene or polynucleotide refers to any gene or polynucleotide which is yielding transcription or translation products at an abnormal level or in an abnormal form in cells derived from a disease-affected tissues compared with tissues or cells of a non disease control. It may be a gene that becomes expressed at an abnormally high level; it may be a gene that becomes expressed at an abnormally low level, where the altered expression correlates with the occurrence and/or progression of the disease. A disease-associated gene also refers to a gene possessing mutation(s) or genetic variation that is directly responsible or is in linkage disequilibrium with a gene(s) that is responsible for the etiology of a disease.

[0463] Examples of disease-associated genes and polynucleotides are available from McKusick-Nathans Institute of Genetic Medicine, Johns Hopkins University (Baltimore, Md.) and National Center for Biotechnology Information, National Library of Medicine (Bethesda, Md.). Examples of disease-associated genes and polynucleotides are listed in Tables A and B of U.S. Pat. No. 8,697,359, which are herein incorporated by reference in their entirety. Disease specific information is available from McKusick-Nathans Institute of Genetic Medicine, Johns Hopkins University (Baltimore, Md.) and National Center for Biotechnology Information, National Library of Medicine (Bethesda, Md.). Examples of signaling biochemical pathway-associated genes and polynucleotides are listed in Tables A-C of U.S. Pat. No. 8,697,359, which are herein incorporated by reference in their entirety.

[0464] Moreover, the genetic elements can encode targeting moieties, as described elsewhere herein. This can be achieved, e.g., by inserting a polynucleotide encoding a sugar, a glycolipid, or a protein, such as an antibody. Those skilled in the art know additional methods for generating targeting moieties.

[0465] Viral Sequence

[0466] In some embodiments, the genetic element comprises at least one viral sequence. In some embodiments, the sequence has homology or identity to one or more sequence from a single stranded DNA virus, e.g., Anellovirus, Bidnavirus, Circovirus, Geminivirus, Genomovirus, Inovirus, Microvirus, Nanovirus, Parvovirus, and Spiravirus. In some embodiments, the sequence has homology or identity to one or more sequence from a double stranded DNA virus, e.g., Adenovirus, Ampullavirus, Ascovirus, Asfarvirus, Baculovirus, Fusellovirus, Globulovirus, Guttavirus, Hytrosavirus, Herpesvirus, Iridovirus, Lipothrixvirus, Nimavirus, and Poxvirus. In some embodiments, the sequence has homology or identity to one or more sequence from an RNA virus, e.g., Alphavirus, Furovirus, Hepatitis virus, Hordeivirus, Tobamovirus, Tobravirus, Tricornavirus, Rubivirus, Birnavirus, Cystovirus, Partitivirus, and Reovirus.

[0467] In some embodiments, the genetic element may comprise one or more sequences from a non-pathogenic virus, e.g., a symbiotic virus, e.g., a commensal virus, e.g., a native virus, e.g., an anellovirus. Recent changes in nomenclature have classified the three anelloviruses able to infect human cells into Alphatorquevirus (TT), Betatorquevirus (TTM), and Gammatorquevirus (TTMD) Genera of the Anelloviridae family of viruses. To date anelloviruses have not been linked to any human disease. In some embodiments, the genetic element may comprise a sequence with homology or identity to a Torque Teno Virus (TT), a non-enveloped, single-stranded DNA virus with a circular, negative-sense genome. In some embodiments, the genetic element may comprise a sequence with homology or identity to a SEN virus, a Sentinel virus, a TTV-like mini virus, and a TT virus. Different types of TT viruses have been described including TT virus genotype 6, TT virus group, TTV-like virus DXL1, and TTV-like virus DXL2. In some embodiments, the genetic element may comprise a sequence with homology or identity to a smaller virus, Torque Teno-like Mini Virus (TTM), or a third virus with a genomic size in between that of TTV and TTMV, named Torque Teno-like Midi Virus (TTMD). In some embodiments, the genetic element may comprise one or more sequences or a fragment of a sequence from a non-pathogenic virus having at least about 60%, 70% 80%, 85%, 90% 95%, 96%, 97%, 98% and 99% nucleotide sequence identity to any one of the nucleotide sequences described herein, e.g., Table 19.

TABLE 19
Examples of viral sequences, e.g., encoding capsid proteins.
The first column identifies the strain by its complete genome accession
number. The second column identifies the accession number of
the protein encoded by the ORF listed in the third column.
The fourth column shows the nucleic acid
sequence encoding the ORF listed in the third column.

| Strain # | Accession # | ORF # | Sequence | SEQ ID NO: |
|---|---|---|---|---|
| AF079173.1 | AA028466.1 | ORF2 | ATGGCTGAGTTTTCCACGCCCGTCCGCAGCGGTG | 585 |
| | | | AAGCCACGGAGGGAGATCACCGCGTCCCGAGGGC | |
| | | | GGGTGCCGAAGGTGAGTTTACACACCGAAGTCAA | |
| | | | GGGGCAATTCGGGCTCGGGACTGGCCGGGCTATG | |
| | | | GGCAAGGCTCTGAAAAAAGCATGTTTATTGGCAGG | |
| | | | CATTACAGAAAGAAAAGGGCGCTGTCACTGTGTGC | |
| | | | TGTGCGAACAACAAAGAAGGCTTGCAAACTACTAA | |
| | | | TAGTAATGTGGACCCCACCTCGCAATGATCAACAG | |
| | | | TACCTTAACTGGCAATGGTACTCAAGTGTACTTAGC | |
| | | | CCCCACGCTGCTATGTGCGGGTGTCCCGACGCTG | |
| | | | TCGCTCATTTTAATCATCTTGCTTCTGTGCTTCGTG | |
| | | | CCCCGCAAAACCCACCCCCTCCCGGTCCCCAGCG | |
| | | | AAACCTGCCCCTCCGACGGCTGCCGGCTCTCCCG | |
| | | | GCTGCGCCAGAGGCGCCCGGAGATAGAGCACCAT | |
| | | | GGCCTATGGCTGGTGGCGCCGAAGGAGAAGACGG | |
| | | | TGGCGCAGGTGGAGACCCAGACCATGGAGGCCCC | |
| | | | GCTGGAGGACCCGAAGACGCAGACCTGCTAGACG | |
| | | | CCGTGGCCACCGCAGAAACGTAA | |
| AF129887.1 | AAD20025.1 | ORF2 | ATGGCTGGGTTTTCCACGCCCGTCCGCAGCGGTG | 586 |
| | | | AAGCCACGGAGGGAGCTCAGCGCGTCCCGAGGG | |
| | | | CGGGTGCCGAAGGTGAGTTTACACACCGCAGTCA | |
| | | | AGGGGCAATTCGGGCTCGGGACTGGCCGGGCTAT | |
| | | | GGGCAAGACTCTGAAAAATGCATTTTTATCGGCAG | |
| | | | GCATTACAGAAAGAAAAAGGCACTGTCACTGTGTG | |
| | | | CAGTGCGAGCAACACAGAAGGCTTGCAAACTTCTA | |
| | | | AAAGTTATGTGGAGCCCTCCCCGCAACGATGAACA | |
| | | | TTACCTTAAGGGACAATGGTACTCAAGTATACTTAG | |
| | | | CTCTCACTCTGCTTTCTGTGGCTGCCCCGATGCTG | |
| | | | TCGCTCACTTCAATCATCTTGCTACTGTACTTCGTG | |
| | | | CTCCGGAAAACCCGGGACCCCCCGGGGGACATCG | |
| | | | ACCTTCTCCGCTCCGGGTCCTACCCGCTCTCCCGG | |
| | | | CTGCTCCCGAGGCGCCCGGTGATCGAGCGCCATG | |
| | | | GCCTATGGGTTGTGGAGGAGACGGCGAAGGAGGT | |
| | | | GGAAGAGGTGGAGACGCAGACGGTGGAGACGCC | |
| | | | GCTGGAGGACCCGCCGACGCAGACCTGCTGGACG | |
| | | | CCGTAGACGCCGCAGAACAGTAA | |
| AF116842.1 | AAD29635.1 | ORF2 | ATGGCTGAGTTTTCCACGCCCGTCCGCAGCGGTG | 587 |
| | | | AAGCCACGGAGGGAGATTACCGCGTCCCGAGGGC | |
| | | | GGGTGCCGAAGGTGAGTTTACACACCGAAGTCAA | |
| | | | GGGGCAATTCGGGCTCGGGACTGGCCGGGCTATG | |
| | | | GGCAAGGCTCTGAAAAAAGCATGTTTATTGGCAGG | |
| | | | CATTACAGAAAGAAAAGGGCGCTGTCACTGTGTGC | |
| | | | TGTGCGAACAACAAAGAAGGCTTGCAAACTACTAA | |
| | | | TAGTAATGTGGACCCCACCTCGCAATGATCAACAG | |
| | | | TACCTTAACTGGCAATGGTACTCAAGTGTACTTAAC | |
| | | | CCCCACGCTGCTATGTTCGGGTGTCCCGACGCTGT | |
| | | | CGCTCATTTTAATCATCTTGCTTCTGTGCTTCGTGC | |
| | | | CCCGCAAAACCCACCCCCTCCCGGTCCCCAGCGA | |
| | | | AACCTGCCCCTCCGACGGGTGCCGGCTCTCCCGG | |
| | | | CTGCGCCAGAGGCGCCCGGAGATAGAGCACCATG | |
| | | | GCCTATGGCTTGTGGCACCGAAGGAGAAGACGGT | |
| | | | GGCGCAGGTGGAAACGCACACCATGGAAGCGCCG | |
| | | | CTGGAGGACCCGAAGACGCAGACCTGCTAGACGC | |
| | | | CGTGGCCGCCGCAGAAACGTAA | |
| AB026345.1 | BAA85661.1 | ORF2 | ATGTTTATTGGCAGGCATTACAGAAAGAAAAGGGC | 588 |
| | | | GCTGTCACTGTGTGCTGTGCGAACAACAAAGAAGG | |
| | | | CTTGCAAACTACTAATAGTAATGTGGACCCCACCT | |
| | | | CGCAATGATCAACAGTACCTTAACTGGCAATGGTA | |
| | | | CTCAAGTGTACTTAGCTCCCACGCTGCTATGTGCG | |
| | | | GGTGTCCCGACGCTGTCGCTCATTTTAATCATCTT | |
| | | | GCTTCTGTGCTTCGTGCCCCGCAAAACCCACCCCC | |
| | | | TCCCGGTCCCCAGCGAAACCTGCCCCTCCGACGG | |
| | | | CTGCCGGCTCTCCCGGCTGCGCCAGAGGCGCCCG | |
| | | | GAGATAGAGCACCATGGCCTATGGCTGGTGGCGC | |
| | | | CGAAGGAGAAGACGGTGGCGCAGGTGGAGACGC | |
| | | | AGACCATGGAGGCGCCGCTGGAGGACCCGAAGAC | |
| | | | GCAGACCTGCTAGACGCCGTGGCCGCCGCAGAAA | |
| | | | CGTAA | |
| AB026346.1 | BAA85663.1 | ORF2 | ATGTTTATTGGCAGGCATTACAGAAAGAAAAGGGC | 589 |
| | | | GCTGTCACTGTGTGCTGTGCGAACAACAAAGAAGG | |
| | | | CTTGCAAACTACTAATACTAATGTGGACCCCACCTC | |
| | | | GCAATGACCAACAGTACCTTAACTGGCAATGGTAC | |
| | | | TCAAGTATACTTAGCTCCCACGCTGCTATGTGCGG | |
| | | | GTGTCCCGACGCTGTCGCTCATTTTAATCATCTTGC | |
| | | | GTCTGTGCTTCGTGCCCCGCAAAACCCACCCCCTC | |
| | | | CCGGTCCCCAGCGAAACCTGCCCCTCCGACGGCT | |
| | | | GCCGGCTCTCCCGGCTGCGCCAGAGGCGCCCGG | |
| | | | AGATAGAGCACCATGGCCTATGGCTGGTGGCGCC | |
| | | | GAAGGAGAAGACGGTGGCGCAGGTGGAGACGCA | |
| | | | GACCATGGAGGCGCCGCTGGAGGACCCGAAGAC | |
| | | | GCAGACCTGCTAGACGCCGTGGCCGCCGCAGAAA | |
| | | | CGTAA | |
| AB026347.1 | BAA85665.1 | ORF2 | ATGTTTATTGGCAGGCATTACAGAAAGAAAAGGGC | 590 |
| | | | GCTGTCACTGTGTGCTGTGCGAACAACAAAGAAGG | |
| | | | CTTGCAAACTACTAATACTAATGTGGACCCCACCTC | |
| | | | GCAATGACCAACAGTACCTTAACTGGCAATGGTAC | |
| | | | TCAAGTATACTTAGCTCCCACGCTGCTATGTGCGG | |
| | | | GTGTCCCGACGCTGTCGCTCATTTTAATCATCTTGC | |
| | | | TTCTGTGCTTCGTGCCCCGCAAAACCCACCCCCTC | |
| | | | CCGGTCCCCAGCGAAACCTGCCCCTCCGACGGCT | |
| | | | GCCGGCTCTCCCGGCTGCGCCAGAGGCGCCCGG | |
| | | | AGATAGAGCGCCATGGCCTATGGCTGGTGGCGCC | |
| | | | GAAGGAGAAGACGGTGGCGCAGGTGGAGACGCA | |
| | | | GACCATGGAGGCGCCGCTGGAGGACCCGAAGAC | |
| | | | GCAGACCTGCTAGACGCCGTGGCCGCCGCAGAAA | |
| | | | CGTAA | |
| AB038622.1 | BAA93585.1 | ORF2 | ATGCCGTGGAGACCGCCGGTACATAACGTTCCAG | 591 |
| | | | GTCGCGAAAATCAATGGTTTGCAGCGTTTTTTCACT | |
| | | | CGCATGCTTCTTTCTGCGGCTGTGGTGACCCTGTT | |
| | | | GGGCATATTAACAGCATTGCTCCTCGCTTTCCTAAC | |
| | | | GCCGGTCCACCGAGACCACCTCCAGGGCTAGAGC | |
| | | | AGCAGAACCCCGAGGGCCCGACGGGTCCCGGAG | |
| | | | GTCCCCCCGCCATCTTGCCAGCTCTGCCGGCCCC | |
| | | | GGCAGACCCTGAACCGCCGCCACGGCTTGGTGGT | |
| | | | GGGGCAGATGGAGGCGCCGCTGGAGGCCTCGCT | |
| | | | ATCGCAGACGCACCTGGAGGGTACGAAGAAGACG | |
| | | | ACCTAGACGAACTTTTCGCCGCCGCCGCCGAGGA | |
| | | | CGATATGTGA | |
| AB038623.1 | BAA93588.1 | ORF2 | ATGCCGTGGAGACCGCCGGCACATAACGTTCCGG | 592 |
| | | | GTAGGGAAAATCAATGGTTCGCAGCTGTGTTTCAC | |
| | | | TCGCATGCTTCTTGGTGCGGCTGTGGTGACGTTGT | |
| | | | TGGGCATCTTAATACCATTGCTACTCGCTTTCCTAA | |
| | | | CGCCGGTCCCCCGAGACCACCTCCAGGGCTAGAC | |
| | | | CAGCAGAACCCCGAGGGCCCGGCGGGTCCCGGA | |
| | | | GGTCCCCCCGCCATCTTGCCTGCTCTGCCGGCCC | |
| | | | CGGCAGACCCTGAACCGCCGCCACGGCGTGGTG | |
| | | | GTGGGGCAGATGGAGGCGTCGATGGAGGCCTCG | |
| | | | CTATCGCAAACGCACCTGGAGATTACGGAGACGAC | |
| | | | GACCTAGACGAACTTTTCGCCGCCGCCGCCGAAG | |
| | | | ACAATATGTGA | |
| AB038624.1 | BAA93591.1 | ORF2 | ATGCCGTGGAAACCGCCGCGACATAACGTTCCGG | 593 |
| | | | GTAGGGAAAACCAATGGTTTGCAGCAGTGTTTCAC | |
| | | | TCGCATGCTTCTTGGTGCGGCTGTGCTGACGTTGT | |
| | | | TGGCCATCTTAATAGCATTGCTACTCGCTTTCCTAA | |
| | | | CATCGGTCCCCCGAGACCACCTCCAGGGCTAGAC | |
| | | | CAGCAGAACCCCGAGGGCCCGGCGGGTCCCGGA | |
| | | | GGTCCCCCCGCCATCTTGCCTGCTCTGCCGGCCC | |
| | | | CGGCAAACCCTGAACCGCCGCCACGGCGTGGTGG | |
| | | | TGGGGCAGATGGAGGCGCCGCTGGAGGCCTCGC | |
| | | | TATCGCAGACGCACCTGGAGGGTACGCAGAAGAC | |
| | | | GACCTAGACGAACTTTTCGCCGCCGCCGCCGAGG | |
| | | | ACGATATGTGA | |
| AF254410.1 | AAF71534.1 | ORF2 | ATGTTTCCTGGTAGGATCCACAGAAAGAAAAGGAA | 594 |
| | | | AGTGCTATTGTCCCCACTGCACCCTGCACCGAAAA | |
| | | | CTCGCCGGGTTATGAGCTGGTCTCGTCCAATACAC | |
| | | | GATGCCCCAGCCATTGAGCGTAACTGGTGGGAAT | |
| | | | CCACAGCTCGATCCCACGCATGTTGCTGTGGCTGC | |
| | | | GGTAATTTTGTTAATCATATTAATGTACTGGCTAATC | |
| | | | GGTATGGCTTTACTGGCTCCGCGCACACGCCGGG | |
| | | | TGGTCCCCGGCCGAGGCCCCCGACAGTGAGCTCT | |
| | | | GGTCCCAGTACTTCCTACCGACACCCCGAGACCG | |
| | | | GCTTTACCATGGCATGGGGATACTGGTGGAGAAG | |
| | | | GCGCTTCTGCGACCGAGGAGACGCTGGAAGAAGG | |
| | | | TGGCGGCGCCGCCGAGACTACAACCCAGAAGATC | |
| | | | TCGACGCTCTGTTCGACGCCCTCGACGAAGAGTAA | |
| AB050448.1 | BAB19927.1 | ORF2 | ATGAGCTTTGTAGAACCCTTACTAACCAGCACCCA | 595 |
| | | | CAGAGAGATAGCATACTACCATGGCTGTGTTCAGA | |
| | | | TGCACAAAGCCTTCTGTGGGTGTGACAACTTTCTTA | |
| | | | CCCACCTGCAACGCATAACAACATACATCTCTGCT | |
| | | | AACCAACACACTCCACCCAGCACACCCTCAAACAC | |
| | | | CCTCCGTAGAGCCCGGGCCCTGCCCGCGGCTCCG | |
| | | | GAGCCAGCTCCATGGCGTGGACCTGGTGGTGGCA | |
| | | | GAGGAGGCGCCGAAGGTGGCCGTGGAGAAGGAG | |
| | | | AAGGTGGAGAAGACTACGCACAAGAAGACCTAGA | |
| | | | CGCCTTGTTCGACGCCGTCGCAAGAGATACAGAGT | |
| | | | AA | |
| AY026465.1 | AAK01941.1 | ORF2 | ATGCACTTTTCTCGAATAAACAGAAAGAAAAAGAAA | 596 |
| | | | GTGCTACTGCTTTGCGTGCCAGCAGCTAAGAAAAA | |
| | | | ACCAACTGCTATGAGCTTCTGGAGACCTCCGGTGC | |
| | | | ACAATGTCACGGGGATCCAGCGCCTGTGGTACGA | |
| | | | GTCCTTTCACCGTGGCCATGCTGCTTTTTGTGGTT | |
| | | | GTGGGGATCCTATACTTCACATTACTACACTTGCTG | |
| | | | AGACATATGGCCATCCAACAGGCCCGAGACCTTCT | |
| | | | GGGTCATCGGGAGTAGACCCCGGCCCCAATATCC | |
| | | | GTCGAGCCAGGCCTGCCCCGGCCGCTCCGGAGC | |
| | | | CCTCACAGGTTGATTCCAGACCGGCCCTGCCATGG | |
| | | | CATGGGGATGGTGGAAGCGACGGCGGCGCTGGT | |
| | | | GGTTCCGGAAGCGGTGGACCCGTGGCAGACTTCG | |
| | | | CAGACGATGGCCTAGACCAGCTCGTCGGCGCCCT | |
| | | | AGACGACGAAGAGTAA | |
| AY026466.1 | AAK01943.1 | ORF2 | ATGCACTTTTCTAGGATACAAAGAAAGAAAAGGCTA | 597 |
| | | | TTGCTACTGCAGACACTGCCAGCTTCAAAGAAAAC | |
| | | | TAGGCAACTTCTGAGAGGTATGTGGAGCCCACCCA | |
| | | | CAGACGATGAACGTGTCCGTGAGCGTAAATGGCTC | |
| | | | CTCTCAGTTTTTCAGTCTCACTGTGCTTTCTGTGGC | |
| | | | TGCAATGATCCTATCGGTCACCTTTGTCGCTTGGC | |
| | | | TACTCTGTCTAACCGCCCGGAGAGCCCGGGGCCC | |
| | | | TCCGGAGGACCCCGTACTCCTCAGATCCGGCACC | |
| | | | TACCCGCTCTCCCGGCTGCTCCCCAAGAGCCCGG | |
| | | | TGATCGAGCACCATGGCCTATGGCTGGTGGGCCC | |
| | | | GGAGACGGAGACGCTGGCGCCGCTGGAAGCGCA | |
| | | | GGCCCTGGAGACGCCGATGGAGGACCCGCAGAC | |
| | | | GCAGACCTCGTCGCCGCTATAGACGCCGCAGACA | |
| | | | TGTAA | |
| AF345521.1 | AAK11697.1 | Orf2 | ATGCACTTTCGCAGAGTCTCAGCGAAAAGGAAACT | 598 |
| | | | GCTACTGCTTCCTCTGCACCCTGCATCGCAGACAC | |
| | | | CTGCCATGAGCTTCAGGGCGCCCTCTCTTAATGCC | |
| | | | GGTCAACGAGAGCAGCTATGGTTCGAGTCCATCGT | |
| | | | CCGATCCCATGACAGTTATTGCGGGTGTGGTGATA | |
| | | | CTGTCGCTCATTTTAATAACATTGCTACTCGCTTTA | |
| | | | ACTATCTGCCTGTTACCTCCTCGCCTCTGGATCCTT | |
| | | | CCTCGGGCCCGCCGCGAGGCCGTCCAGCGCTCC | |
| | | | GCGCACTCCCGGCTCTGCCAGCGGCACCCTCCAC | |
| | | | CCCCTCTACTAGCCGACCATGGCGTGGTGGGGCA | |
| | | | GATGGAGAAGGTGGCCGCGGCGCCGGTGGAGGA | |
| | | | GATGGCGGCGCCGCCGTAGAAGGAGACTACCAAC | |
| | | | AAGAAGAACTCGACGAGCTGTTCGCGGCCTTGGA | |
| | | | AGACGACCAAGAAAGACGGTAA | |
| AF345522.1 | AAK11699.1 | Orf2 | ATGTTTCTTGGCAGGGCCTGGAGAAAGAAAAGGCA | 599 |
| | | | AGTGCCACTGCCGACACTGCCAGTGGTGCCGCTT | |
| | | | CCACAACCTTCACCTATGAGCAGCCAGTGGAGACC | |
| | | | CCCGGTTCACAATGTCCAGGGGCTGGAGCGCAAT | |
| | | | TGGTGGGAGTGCTTCTTCCGTTCTCATGCTTGTTTT | |
| | | | TGTGGCTGTGGTGATGCTATTACTCATATTAATCAT | |
| | | | CTGGCGACTCGTTTTGGACGTCCTCCTACTACCTC | |
| | | | AACTCCCCGAGGACCGCAGGCACCTCCAGTGACT | |
| | | | CCGTACCCGGCCCTGCCGGCCCCAGAGCCTAGCC | |
| | | | CTGAGCCATGGCGTGGCGCCGGTGGCGATGGCG | |
| | | | GCCGTGGTGGAGACGCCGGAGGCGCCGCCGGTG | |
| | | | GAGAAGGAGACGGAGGAGACCCAGACGACGCCG | |
| | | | CCCTTATCGACGCCGTCGACCTCGCAGAGTAA | |
| AF345525.1 | AAK11705.1 | Orf2 | ATGTTTCTTGGTAAAATTTACAGACAGAAAAGGAAA | 600 |
| | | | GTGCCACTGTACGGCCTGCCAGCTCCAAAGAAAAA | |
| | | | ACCACCTACTGCTATGAGCCACTGGAGCAGACCC | |
| | | | GTCCACCATGCAACGGGGATCGAGCACCTCTGGT | |
| | | | ACCAGTCTGTTATTAACAGCCATTCTGCTAGCTGC | |
| | | | GGTTGTGGCGATCCTGTACGCCACTTTACTTATCTT | |
| | | | GCTGAGAGGTATGGCTTTGCCCCAACTTCCCGGG | |
| | | | CCCCGCCGGTAGCCCCAACGCCCACCATCCGTAG | |
| | | | AGCCAGGCCCGCGCCTGCCGCTCCGGAGCCCCGT | |
| | | | GCCCTACCATGGCATGGGGATGGTGGAGACGAAG | |
| | | | GCGCAAGTGGTGGTGGAGACGCCGGTTCGCCCGA | |
| | | | AGCAGACTTCGCAGACGACGGATTAGACGCCCTC | |
| | | | GTCGCCGCACTCGACGAAGAACAGTAA | |
| AF345527.1 | AAK11709.1 | Orf2 | ATGTTTCTCGGCAGGCCTTACAGAAAGAAGAGGCA | 601 |
| | | | AGTGCCACTGCCTGGCGTGCACCATCCACCGCAC | |
| | | | CCACGGCCTAGCATGAGCCACCACTGGCGGGAGC | |
| | | | CCATCGACAATGTCCCCAACCGGGAGAGGCACTG | |
| | | | GCTCGGGTCCGTCCTCCGAGGCCACCGAGCTTTTT | |
| | | | GTGGTTGTCGGGATCCTGTGCTTCATTTTACTAATC | |
| | | | TGGTTGCACGTTACAATCTTCAGGGCGGTGGTCCC | |
| | | | TCAGCGGGTAGTCTTAGGGATCCGCCGCCACTGA | |
| | | | GGAGGGCGCTGCCGCCACCGCCGTCCCCCCGAC | |
| | | | CGCCATGTCCTGGTGGGGATGGCGCCGCCGATGG | |
| | | | TGGTGGAAGCCACGGAGGCGATGGAGACGCAGGA | |
| | | | GGGCGCGCCGCCCGAGACGACTACCGCGACGAC | |
| | | | GATATAGAAGACCTACTCGCCGCTATCGAGGCAGA | |
| | | | CGAGTAA | |
| AF345528.1 | AAK11711.1 | Orf2 | ATGCGATTTTCTCGAATTTATCGCAGAAAGAAGAG | 602 |
| | | | GCTACTGCCACTGCTACTGGTGCCAACAGAACCGA | |
| | | | AAGAACAATTTGTGATGAGCTGGCGCTGTCCCTTA | |
| | | | GAAAATGCCTATAAGAGGGAAATTAACTTCCTCAG | |
| | | | AGGGTGCCAAATGCTTCACACTTGTTTTTGTGGTTG | |
| | | | TGATGATTTTATTAATCATATTATTCGCCTACAAAAT | |
| | | | CTTCACGGGAATTTACACCAACCCACCGGCCCGTC | |
| | | | CACACCTCCAGTAGGCCGTAGAGCTCTGGCCCTG | |
| | | | CCGGCAGCTCCGGAACCATGGCGTGGAGATGGTG | |
| | | | GTGGGCCCGAAGGCGACCGAACCGCCGATGGAC | |
| | | | CCGCAGACGCTGGAGGAGACTACGCACCCGGAGA | |
| | | | CCTAGACGACCTGTTCGCCGCCGCCGCCGCCGAC | |
| | | | CAAGAGTAA | |
| AF345529.1 | AAK11713.1 | Orf2 | ATGGGCAACGCTCTTAGGGTATTCATTCTTAAAATG | 603 |
| | | | TTTATCGGCAGGGCCTACCGCCACAAGAAAAGGAA | |
| | | | AGTGCTACTGTCCGCACTGCGAGCTCCACAGGCG | |
| | | | TCTCGGAGGGCTATGAGTTGGAGACCCCCTGTACA | |
| | | | CGATGCGCCCGGCATCGAGCGCAATTGGTACGAG | |
| | | | GCCTGTTTCAGAGCCCACGCTGGAACTTGTGGCTG | |
| | | | TGGCAATTTTATTATGCACATTAATCTTCTGGCTGG | |
| | | | GCGTTATGGTTTTACTCCGGTATCAGCACCACCAG | |
| | | | GTGGTCCTCCTCCGGGCACCCCGCAGATAAGGAG | |
| | | | AGCCAGACCTAGTCCCGCCGCGCCCGAACAGCCC | |
| | | | CAGGCCCTACCATGGCATGGGGATGGTGGAGACG | |
| | | | GTGGCGCCGGTGGCCCACCAGACGCTGGAGGAG | |
| | | | ACGCCGTCGCCGGCGCCCCGTACGGAGAACAAGA | |
| | | | GCTCGCCGACCTGCTCGACGCTATAGAAGACGAC | |
| | | | GAACAGTAA | |
| AF371370.1 | AAK54732.1 | ORF2 | ATGGCACACCCGGGCATGATGATGCTAAGCAAAAT | 604 |
| | | | GAAAATACTAGTACCCAGTTCTGACACCAGACCGG | |
| | | | GGGGCAGACGCAGAGTAAAAGTTAAAATAAGACCC | |
| | | | CCGGCCCTTTTAGAAGACAAGTGGTACACTCAGCA | |
| | | | AGATCTAGCGCCCGTTAATCTTGTGTCACTTGTGG | |
| | | | TTTCTGCGACTAGCTTCATACATCCGTTTAGCCAAC | |
| | | | CACAAACGAACAACATTTGCACAACTTTTCAGGTGT | |
| | | | TGAAAGACATGTACTATGACTGCATAGGAGTTAGTT | |
| | | | CCACTTTAGACGACAAATATAAAAAATTATTTCAAA | |
| | | | AATTATACACTAAATGCTGCTACTTTGAAACATTTC | |
| | | | AAACAATAGCCCAGCTAAACCCCGGCTTTAAATCT | |
| | | | GCTAAAAAAACTACAACTGGCTCCGGTAAGGAAGC | |
| | | | TGCCACACTAGGCGACGCAGTTACACAATTAAAAA | |
| | | | ACCAACACGGTAGTTTTTATACTGGAAACAATAGTA | |
| | | | CTTTTGGCTGCTGTACATATAACCCCACTGAAGAAA | |
| | | | TAGGTAAAGCAGCAAATGAGTGGTTCTGGAACCAA | |
| | | | TTAACTGCAACAGAGTCAGACACACTAGGACAGTA | |
| | | | CGGACGTGCCTCAATTAAGTACTTTGAATATCACAC | |
| | | | AGGACTATACAGTTCCATATTTTTAAGTCCACTAAG | |
| | | | GAGCAACCTAGAATTTTCTACAGCATACCAGGATG | |
| | | | TAACATACAATCCACTGACAGACCTAGGCATAGGC | |
| | | | AACAGAATCTGGTACCAATACAGTACCAAGCCAGA | |
| | | | CACTACATTTAACGAAACACAGTGCAAATGTGTACT | |
| | | | AACTGACCTGCCCCTGTGGTCCCTGTTTTATGGAT | |
| | | | ACGTAGACTTTATAGAGTCAGAGCTAGGCATAAGC | |
| | | | GCAGAGATACACAACTTTGGCATAGTTTGCGTTCA | |
| | | | GTGCCCATACACCTTTCCACCCATGTTCGACAAGT | |
| | | | CTAAGCCAGACAAGGGCTACGTATTTTATGACACC | |
| | | | CTTTTTGGTAACGGAAAGATGCCAGACGGTTCCGG | |
| | | | ACACGTACCTACCTACTGGCAGCAGAGATGGTGG | |
| | | | CCAAGATTTAGCTTCCAGAGACAAGTAATGCATGA | |
| | | | CATTATTCTGACTGGACCTTTTAGTTACAAAGATGA | |
| | | | CTCTGTAATGACTGGACTAACAGCAGGCTACAAGT | |
| | | | TTAAATTCACATGGGGCGGTGATATGATCTCCGAA | |
| | | | CAGGTCATTAAAAACCCCGACAGAGGTGACGGAC | |
| | | | GCGAATCCTCCTATCCCGATAGACAGCGCCGCGA | |
| | | | CCTACAAGTTGTTGACCCTCGCTCCATGGGGCCCC | |
| | | | AATGGGTATTCCACACCTTTGACTACAGGAGGGGA | |
| | | | CTATTTGGAAAGGACGCTATTAAACGAGTGTCAGA | |
| | | | AAAACCGACAGATCCTGACTACTTTACAACACCTTA | |
| | | | CAAAAAACCGAGGTTTTTCCCCCCAACAGCAGGAG | |
| | | | AAGAAAGACTGCAAGAAGAAAACTACACTTTACAG | |
| | | | GAGAAAAGAGACCCGTTCTCGTCAGAAGAGGGGC | |
| | | | CGCAGAGGACGCAAGTCCTCCAGCAGCAGGTCCT | |
| | | | CCAGTCGGAGCTCCAGCAGCAGCAGGAGCTCGGG | |
| | | | GACCAGCTCAGATTCCTCCTCAGGGAAATGTTCAA | |
| | | | AACCCAAGCGGGTATACACATGAACCCCCGCGCAT | |
| | | | TTCAAGAGCTGTAA | |
| AB060596.1 | BAB69915.1 | ORF2 | ATGAGCTGGTGTACTCCAGTTGAAAATGCCTATAA | 605 |
| | | | GAGAGAGATCCACTTTCTCAGGGGCTGTCAACTGC | |
| | | | TTCACACTAGCTTTTGTGGTTGCGATGATTTTATTA | |
| | | | ATCATATTATTCGCCTACAAAATCTTCACGGCAACC | |
| | | | TACACCAGCCCACGGGACCGTCCACACCTCCAGT | |
| | | | GACCCGTAGAGCTCTGGCCTTGCCGGCTGCTCCG | |
| | | | GAGTCATGGCGTTCCGGTGGTGGTGGTGGAGACG | |
| | | | CCGCCCGCAGCGACGATGGACCCGGCGCCGATG | |
| | | | GAGGAGACTACGAACCCGCCGACCTAGACGCACT | |
| | | | GTACGACGCCGTCGCCGCAGACCAAGAGTAA | |
| AB060592.1 | BAB69899.1 | ORF2 | ATGAGCTTTGTAGAACCGTTACTAAGCAGCACCCA | 606 |
| | | | CCGAGAGATAGCATTCTACCATGGCTGTGTTCAAA | |
| | | | TGCACAAGGCCTTCTGTGGCTGTGACAACTTTCTT | |
| | | | ACCCACCTGCAGCGCATAACAACATACATCTCTGC | |
| | | | TAATCAACACACTCCACCCAGCACACCCTCAAACA | |
| | | | CCCTCCGTAGAGCCCGGGCCCTGCCCGCGGCTCC | |
| | | | GGAGCCAGCTCCATGGCGTGGACCTGGTGGTGGC | |
| | | | AGAGGAGGCGCCGAAGGTGGCCGTGGAGAAGGA | |
| | | | GAAGGTGGAGAAGACTACGCACCAGAAGACCTAG | |
| | | | ACGACTTGTTCGCCGCCGTCGCAAGAGATACAGA | |
| | | | GTAA | |
| AB060593.1 | BAB69903.1 | ORF2 | ATGAGTCTGTGGCGACCCCCGGTCCACAATGCCC | 607 |
| | | | CCGGCAGAGAGAGACTTTGGTTTCAGGCCTGTTAC | |
| | | | GAATCTCACAGTGCTTTTTGTGGCTGTGGTAGCTTT | |
| | | | ATTCTTCATCTTACTAGCTTGGCTGCACGTTTTAAT | |
| | | | TTTCAGGCCGGGCCACCGCCTCCCGGGGGTCCCC | |
| | | | GGGCGGAGACCCCGCCGATTCTGAGGGCGCTGC | |
| | | | CGGCACCCCAGCCGCGCCGCCACCGCCAGACGG | |
| | | | AGAACCCCGGGTCTGAGCCATGGCCTGGAGATGG | |
| | | | TGGTGGAGACGGCGCTGGAAGCCAAGAAGGCGG | |
| | | | CCAGCGTGGACCAAGTACCGCAGACGCAGGTGGA | |
| | | | GACGACTTCGACCCCGCAGACCTAGAAGACTTGCT | |
| | | | CGCGGCCGTCGAAGAAGACGAACAGTAA | |
| AB060595.1 | BAB69911.1 | ORF2 | ATGAATCTCTGGCGACCCCCTCTGAGAAATATCCC | 608 |
| | | | CCACAGGGAGAGATGTTGGCTTGAGGCCTGTCTC | |
| | | | AGAGCCCACGATTCTTTTTGTGGCTGTCCTAGTCC | |
| | | | TATTGTTCATTTTTCTAGTCTGGTTGCACGTTTTAAT | |
| | | | CTACAAGGAGGCCCGCCGCCAGAGGATGACTCCC | |
| | | | CACAGGGCGCGCCAGTCCTGAGGGCCCTGCCGG | |
| | | | CACCGAGCCCCCACAGGCACACCCGCACGGAGAA | |
| | | | CCCCTCCGGTGAGCCATGGCCTACTCCTACTGGTG | |
| | | | GCGCCGCCGGAGGTGGCCGTGGAGAGGCCGATG | |
| | | | GAGGCGCTGGAGGCGCCGCAGACGAATACCGCG | |
| | | | CCGAAGACCTAGACGACCTGTTCGCCGCTATCGAA | |
| | | | GGAGACCAGTAA | |
| AB064596.1 | BAB79313.1 | ORF2 | ATGCCGTGGAGACCGCCGGCTCATAACGTCCAGG | 609 |
| | | | GGCGAGAGAGCCAGTGGTTCGCGGCTTGTTTTCA | |
| | | | CGGCCACGCTTCGTTTTGCGGCTGCGGTGACTTTA | |
| | | | TTGGGCATATTAACAGCCTTGCTCCTCGCTTTCCTA | |
| | | | ACAACCAAGGACCCCCGCATCCACCTGCCTTAAAC | |
| | | | AGGCCACCTGCACAGGGCCCAGAAAGCCCCGGG | |
| | | | GGTTCCATACTACCCCTGCCAGCCCTACCGGCACC | |
| | | | ACCTGATCCGCCACCACGGCCTGGTGGTGGGGAA | |
| | | | GACGGTGGCGACGCCGCCCGTGGGGCCGCTGGC | |
| | | | GCCGCCGAAGGCGCGTATGGAGAAGAAGACCTAG | |
| | | | AACTGCTGTTCGCCGCCGCCGAGGAAGACGATAT | |
| | | | GTGA | |
| AB064597.1 | BAB79317.1 | ORF2 | ATGCCGTGGAGACCGCCGGTGCATAGTGTCCAGG | 610 |
| | | | GGCGAGAGGATCAGTGGTTCGCGAGCTTTTTTCAC | |
| | | | GGCCACGCTTCATTTTGCGGTTGCGGTGACGCTGT | |
| | | | TGGCCATCTTAATAGCATTGCTCCTCGCTTTCCTCG | |
| | | | CGCCGGTCCACCAAGGCCCCCTCCGGGGCTAGAG | |
| | | | CAGCCTAACCCCCCGCAGCAGGGCCCGGCCGGG | |
| | | | CCCGGAGGGCCGCCCGCCATCTTGGCGCTGCCG | |
| | | | GCTCCGCCCGCGGAGCCTGACGACCCGCAGCCAC | |
| | | | GGCGTGGTGGTGGGGACGGTGGCGCCGCCGCTG | |
| | | | GCGCCGCAGGCGACCGTGGAGACCGAGACTACGA | |
| | | | CGAAGAAGAGCTAGACGAGCTTTTCCGCGCCGCC | |
| | | | GCCGAAGACGATTTGTAA | |
| AB064599.1 | BAB79325.1 | ORF2 | ATGCCGTGGTCTCTGCCGAGACATAATATCAGAAC | 611 |
| | | | GAGAGAAGATCTCTGGGTGCAATCGATTCTTTATTC | |
| | | | ACATGACACTTTTTGTGGCTGTGATAATATTCCTGA | |
| | | | GCATCTTACTGGCCTCCTGGGCGGCGTACGACCA | |
| | | | GCTCCACCTAGAAACCCAGGACCCCCTACCATACG | |
| | | | GAGCCTGCCGGCACTGCCGCCAGCTCCGGAACCC | |
| | | | CCTGAGGAACCACGGCGTGGTGGAGATACAGACG | |
| | | | GAGACCGTGGAGAAGATGGAGGAGACGCCGCTGG | |
| | | | GGCCTACGAACCCGAAGACCTAGAAGAACTTTTCG | |
| | | | CCGCCGCCGAGCAAGACGATATGTGA | |
| AB064600.1 | BAB79329.1 | ORF2 | ATGTCGTGGAGACCGCCGAGCCAAAATTTACTGCA | 612 |
| | | | AAGAGAAGAGGCCTGGTACTCAGCTTTTCTTAGCT | |
| | | | CGCATTCTACATTTTGCGGTTGTACTGACCCTCTGC | |
| | | | TGCATATTACTCTCATTGCTGGCCGCCTTACTAACC | |
| | | | CCGTACCCGTCACCCGCCAACCGGAGACCCCTCC | |
| | | | TAACGGCCTCAGGGGGCTGCCGGCACTGCCAGCA | |
| | | | CCCCCTGAACCACCAGCACCGCCACCACGGCCTG | |
| | | | GGGATGGTACCGGAGAAGAAGATGGCGCCCATGG | |
| | | | AGAAGGAGAAGGTGGGCGATACGCAGAAGAAGAC | |
| | | | CTAGAAGAACTGTTCGCCGCCGCGGCAGAAGACG | |
| | | | ATATGTGA | |
| AB064601.1 | BAB79333.1 | ORF2 | ATGTCGTGGGCTCCGCCGCTATTCAACTCGAAACA | 613 |
| | | | GAGAGAGGACCAGTGGTACCAGTCAATTATTTTCA | |
| | | | GCCATAATACTTTTTGCGGCTGCGGTGACCTTGTT | |
| | | | AGGCATTTTTGCGTCGTTGCTTCTCGCTTTACTGAG | |
| | | | CCTCCTGTAGTGCCGGCCCTACCGGCACCGGTAC | |
| | | | CGGCACCGCCACGGCGTGGTACAGAAGAAGAAGG | |
| | | | TGGAGACCGTGGAGAAGACGCCGCAGACCGTGGA | |
| | | | CCCTACGCAGAAGAAGAGCTAGAAGATTTGTTCGC | |
| | | | CGCCGCCCGAGAAGACGATATGTGA | |
| AB064602.1 | BAB79337.1 | ORF2 | ATGCCGTGGCATCCACCGGGCTACAACGTTCAACA | 614 |
| | | | GAGAGAAGAGCTCTGGGTACAGACAGTTACTACTT | |
| | | | CACATGCTACTTTTTGCGGCTGTGGTGACCCTAGT | |
| | | | AGCCATCTTCACCGCATTCTTAGCCGCCTTAATAAC | |
| | | | AGCAGCCGGCGGCCCCCCGAAACCCCAAACCCCA | |
| | | | TTCGTGCCCTACCGGCCCTACCGGCACCCCAAGA | |
| | | | ACCTGAACAGCCGCCATCACGGCCTGGTACCGGT | |
| | | | ACAGAAGAAGGCCATGGCGCCGAAGGAGGCGACC | |
| | | | GAGGTGGGGCCTACGCAGAAGAAGATTTAGAAGA | |
| | | | TCTTTTCGCGGCCGCGGAAGAAGACGATATGTGA | |
| AB064603.1 | BAB79341.1 | ORF2 | ATGTCGTGGCGACCGCCGTTGCATTCTATCCAAGG | 615 |
| | | | CAGAGAAGATCAATGGTATGCAGGCATCTTTCATA | |
| | | | CGCATTTTGCTTTTTGCGGTTGTGGTGACCCTGTT | |
| | | | GGGCGTATTAACCGCATTGCTCACCGCTTTCCTAA | |
| | | | CGCCGGTCCCCCGAGACCACCTCCAGGGCTAGAC | |
| | | | CAGCCCAACCTCGGAGGGCCGGAAGGTCCAGGAG | |
| | | | GTGCCCCTAGAGCCCTGCCAGCCCTGCCGGCCCC | |
| | | | GGCAGAGCCAGAGCCGGCACCACGGCGTGGTGG | |
| | | | TGGGGCCGATGGAGACAGCGCCGCTGGGGCCGC | |
| | | | CGCCGCCGCAGACCATGGAGGGTACGACGAAGGA | |
| | | | GACCTAGAAGATCTTTTCGCCGCCGCCGCCGAGG | |
| | | | ACGATATGTGA | |
| AB064604.1 | BAB79345.1 | ORF2 | ATGAGTATTTGGAGGCCTCCACTGCACAATGTCCC | 616 |
| | | | GGGACTCGAACACCTCTGGTACGAGTCAGTGCATC | |
| | | | GTAGCCATGCTGCTGTTTGTGGCTGTGGGGATCCT | |
| | | | GTACGCCATCTTACTGCTCTTGCTGAAAGATATGG | |
| | | | CATTCCGGGAGGGTCGCGGTCTTCTGGGGCACCG | |
| | | | GGAGTAGGGGGCAACCACAACCCTCCCCAGATCC | |
| | | | GTCGAGCCCGCCACCCGGCGGCTGCTCCGGACCC | |
| | | | CCCAGCAGGTAACCAGCCTCCGGCCCTGCCATGG | |
| | | | CATGGGGATGGTGGAAACGAAAGCGGCGCTGGTG | |
| | | | GTGGAGAAAGCGGTGGACCCGTGGCCGACTTCGC | |
| | | | AGACGATGGCCTAGACGATCTCGTCGCCGCCCTC | |
| | | | GACGAAGAAGAGTAA | |
| AB064606.1 | BAB79353.1 | ORF2 | ATGAGCTTCTGGAGACCTCCGGTGCACAATGCCAC | 617 |
| | | | GGGGATCCAGCGCCTGTGGTACGAGTCCTTTCAC | |
| | | | CGTGGCCATGCTGCTTTTTGTGGTTGTGGGGATCC | |
| | | | TATACTTCACATTACTGCACTTGCTGAGACATATGG | |
| | | | CCATCCAACAGGCCCGAGACCTTCTGGGCCACCG | |
| | | | CGAGTAGACCCCGATCCCCAGATCCGTAGAGCCA | |
| | | | GGCCTGCCCCGGCCGCTCCGGAGCCCTCACAGGT | |
| | | | TGAGCCGAGACCTGCCCTGCCATGGCATGGGGAT | |
| | | | GGTGGAAGCGACGGCGGCGCTGGTGGTTCCGGA | |
| | | | AGCGGTGGACCCGTGGCAGACTTCGCAGACGATG | |
| | | | GCCTCGATCAGCTCGTCGCCGCCCTAGACGACGA | |
| | | | AGAGTAA | |
| DQ003341.1 | AAX94181.1 | ORF2 | ATGGGCAAGGCTCTTAGAGTATTTATTCTTAATATG | 618 |
| | | | CGCTTTTCCAGAATTTACAAACAGAAGAAGAGGCC | |
| | | | ACTGCCACTGCTTCTGGTGCGAGTTGAACCGAAAG | |
| | | | CATTCGCTAGTGATATGAGTTGGCGCCCTCCCGTT | |
| | | | CACAATGCGGCAGGAATTGAGCGACAGCTCCTTGA | |
| | | | GGGCTGCTTTCGATTTCACGCTGCCTGTTGCGGTT | |
| | | | GTGGCAGTTTTATTACTCATCTTACTATACTGGCTG | |
| | | | CTCGCTATGGTTTTACTGGGGGGCCGGCGCCGCC | |
| | | | AGGTGGTCCTGGGGCGCTGCCATCGCTGAGACGG | |
| | | | GCTCAGCCCGCGCCGGCGGCCCCCGAGAACCAG | |
| | | | CCTGAACCAGAGCTATGGCGTGGTCGTGGTGGTG | |
| | | | GAGGCGACGGAAACGCTGGTGGCCGCGCAGAAG | |
| | | | GAGGCGATGGAGGAGATTTCGCACCCGAAGAGCT | |
| | | | AGACGAGCTGTTCCGCGCCGTCGCCGCCGACGAA | |
| | | | GAGTAA | |
| DQ003342.1 | AAX94184.1 | ORF2 | ATGGGCAAGGCTCTTAGAGTATTTATTCTTAATATG | 619 |
| | | | CGCTTTTCCAGAATTTACAAACAGAAGAAGAGGCC | |
| | | | ACTGCCACTGCTTCTGGTGCGAGTTGAACCGAAAG | |
| | | | CATTCGCTAGTGATATGAGTTGGCGCCCTCCCGTT | |
| | | | CACAATGCGGCAGGAATTGAGCGACAGCTCCTTGA | |
| | | | GGGCTGCTTTCGATTTCACGCTGCCTGTTGCGGTT | |
| | | | GTGGCAGTTTTATTACTCATCTTACTATACTGGCTG | |
| | | | CTCGCTATGGTTTTACTGGGGGGCCGGCGCCGCC | |
| | | | AGGTGGTCCTGGGGCGCTGCCATCGCTGAGACGG | |
| | | | GCTCAGCCCGCGCCGGCGGCCCCCGAGAACCAG | |
| | | | CCTGAACCAGAGCTATGGCGTGGTCGTGGTGGTG | |
| | | | GAGGCGACGGAAACGCTGGTGGCCGCGCAGAAG | |
| | | | GAGGCGATGGAGGAGATTTCGCACCCGAAGAGCT | |
| | | | AGACGAGCTGTTCCGCGCCGTCGCCGCCGACGAA | |
| | | | GAGTAA | |
| DQ003343.1 | AX94187.1 | ORF2 | ATGGGCAAGGCTCTTAGAGTATTCATTCTTAATATG | 620 |
| | | | CGCTTTTCCAGAATTTACAAACAGAAGAAGAGGCC | |
| | | | ACTGCCACTGCTTCTGGTGCGAGTTGAACCGAAAG | |
| | | | CACTCGCTAGTGATATGAGTTGGCGCCCTCCCGTT | |
| | | | CACAATGCGGCAGGAATTGAGCGACAGCTCCTTGA | |
| | | | GGGCTGCTTTCGATTTCACGCTGCCTGTTGCGGTT | |
| | | | GTGGCAGTTTTATTACTCATCTTACTATACTGGCTG | |
| | | | CTCGCTATGGTTATACTGGGGGGCCGGCGCCGCC | |
| | | | AGGTGGTCCTGGGGCGCTGCCATCGCTGAGACGG | |
| | | | GCTCTGCCCGCGCCGGCGGCCCCCGAGAACCAG | |
| | | | CCTGAACCAGAGCTATGGCGTGGTCGTGGTGGTG | |
| | | | GAGGCGACGGAAACGCTGGTGGCCGCGCAGAAG | |
| | | | GAGGCGATGGAGGAGATTTCGCACCCGAAGAGCT | |
| | | | AGACGAGCTGTTCCGCGCCGTCGCCGCCGACGAA | |
| | | | GAGTAA | |
| DQ003344.1 | AAX94190.1 | ORF2 | ATGGGCAAGGCTCTTAGAGTATTCATTCTTAATATG | 621 |
| | | | CGCTTTTCCAGAATTTACAAACAGAAGAAGAGGCC | |
| | | | ACTGCCACTGCTTCTGGTGCGAGTTGAACCGAAAG | |
| | | | CACTCGCTAGTGATATGAGTTGGCGCCCTCCCGTT | |
| | | | CACAATGCGGCAGGAATTGAGCGACAGCTCCTTGA | |
| | | | GGGCTGCTTTCGATTTCACGCTGCCTGTTGCGGTT | |
| | | | GTGGCAGTTTTATTACTCATCTTACTATACTGGCTG | |
| | | | CTCGCTATGGTTATACTGGGGGGCCGGCGCCGCC | |
| | | | AGGTGGTCCTGGGGCGCTGCCATCGCTGAGACGG | |
| | | | GCTCTGCCCGCGCCGGCGGCCCCCGAGAACCAG | |
| | | | CCTGAACCAGAGCTATGGCGTGGTCGTGGTGGTG | |
| | | | GAGGCGACGGAAACGCTGGTGGCCGCGCAGAAG | |
| | | | GAGGCGATGGAGGAGATTTCGCACCCGAAGAGCT | |
| | | | AGACGAGCTGTTCCGCGCCGTCGCCGCCGACGAA | |
| | | | GAGTAA | |
| DQ186994.1 | ABD34285.1 | ORF2 | ATGGGCAAGGCTCTTAGAGTATTCATTCTTAATATG | 622 |
| | | | CGCTTTTCCAGAATTTACAAACAGAAGAAGAGGCC | |
| | | | ACTGCCACTGCTTCTGGTGCGAGTTGAACCGAAAG | |
| | | | CACTCGCTAGTGATATGAGTTGGCGCCCTCCCGTT | |
| | | | CACAATGCGGCAGGAATTGAGCGACAGCTCCTTGA | |
| | | | GGGCTGCTTTCGATTTCACGCTGCCTGTTGCGGTT | |
| | | | GTGGCAGTTTTATTACTCATCTTACTATACTGGCTA | |
| | | | CTCGCTATGGTTTTACTGGGGGGCCGGCGCCGCC | |
| | | | AGGTGGTCCTGGGGCGCTGCCATCGCTGAGACGG | |
| | | | GCTCTGCCCGCGCCGGCGGCCCCCGAGAACCAG | |
| | | | CCTGAACCAGAGCTATGGCGTGGTCGTGGTGGTG | |
| | | | GAGGCGACGGAAACGCTGGTGGCCGCGCAGAAG | |
| | | | GAGGCGATGGAGGAGATTTCGCACCCGAAGAGCT | |
| | | | AGACGAGCTGTTCCGCGCCGTCGCCGCCGACGAA | |
| | | | GAGTAA | |
| DQ186995.1 | ABD34287.1 | ORF2 | ATGGGCAAGGCTCTTAGAGTATTCATTCTTAATATG | 623 |
| | | | CGCTTTTCCAGAATTTACAAACAGAAGAAGAGGCC | |
| | | | ACTGCCACTGCTTCTGGTGCGAGTTGAACCGAAAG | |
| | | | CACTCGCTAGTGATATGAGTTGGCGCCCTCCCGTT | |
| | | | CACAATGCGGCAGGAATTGAGCGACAGCTCCTTGA | |
| | | | GGGCTGCTTTCGATTTCACGCTGCCTGTTGCGGTT | |
| | | | GTGGCAGTTTTATTACTCATCTTACTATACTGGCTA | |
| | | | CTCGCTATGGTTTTACTGGGGGGCCGGCGCCGCC | |
| | | | AGGTGGTCCTGGGGCGCTGCCATCGCTGAGACGG | |
| | | | GCTCTGCCCGCGCCGGCGGCCCCCGAGAACCAG | |
| | | | CCTGAACCAGAGCTATGGCGTGGTCGTGGTGGTG | |
| | | | GAGGCGACGGAAACGCTGGTGGCCGCGCAGAAG | |
| | | | GAGGCGATGGAGGAGATTTCGCACCCGAAGAGCT | |
| | | | AGACGAGCTGTTCCGCGCCGTCGCCGCCGACGAA | |
| | | | GAGTAA | |
| DQ186996.1 | ABD34289.1 | ORF2 | ATGGGCAAGGCTCTTAGGGTCTTCATTCTTAATATG | 624 |
| | | | TTCCTTGGCAGGGTTTACCGCCACAAGAAAAGGAA | |
| | | | AGTGCTACTGTCTACACTGCGAGCTCCACAGGCGT | |
| | | | CTCGCAGGGCTATGAGTCGGCGACCCCCGGTACA | |
| | | | CGATGCACCCGGCATCGAGCGCAATTGGTACGAG | |
| | | | GCCTGTTTCAGAGCCCACGCTGGAGCTTGTGGCT | |
| | | | GTGGCAATTTTATTATGCACCTTAATCTTCTGGCTG | |
| | | | GGCGTTATGGTTTTACTCCGGGGTCAGCGCCGCC | |
| | | | AGGTGGTCCTCCTCCGGGCACCCCGCAGATAAGA | |
| | | | AGAGCCAGACCTAGTCCCGCCGCACCCCAAGAGC | |
| | | | CCGCTGCTCTACCATGGCATGGGGATGGTGGAGA | |
| | | | TGGCGGCGCCGCTGGCCCGCCAGACGCTGGAGG | |
| | | | AGACGCCGTCGCCGGCGCCCCGTACGGAGAACAA | |
| | | | GAGCTCGCCGACCTGCTCGACGCTATAGAAGACG | |
| | | | ACGAACAGTAA | |
| DQ186997.1 | ABD34291.1 | ORF2 | ATGGGCAAGGCTCTTAGGGTCTTCATTCTTAATATG | 625 |
| | | | TTCCTTGGCAGGGTTTACCGCCACAAGAAAAGGAA | |
| | | | AGTGCTACTGTCCACACTGCGAGCTCCACAGGCGT | |
| | | | CTCGCAGGGCTATGAGTTGGCGACCCCCGGTACA | |
| | | | CGATGCACCCGGCATCGAGCGCAATTGGTACGAG | |
| | | | GCCTGTTTCAGAGCCCACGCTGGAGCTTGTGGCT | |
| | | | GTGGCAATTTTATTATGCACCTTAATCTTCTGGCTG | |
| | | | GGCGTTATGGTTTTACTCCGGGGTCAGCGCCGCC | |
| | | | AGGTGGTCCTCCTCCGGGCACCCCGCAGATAAGA | |
| | | | AGAGCCAGACCTAGTCCCGCCGCACCCCAAGAGC | |
| | | | CCGCTGCTCTACCATGGCATGGGGATGGTGGAGA | |
| | | | TGGCGGCGCCGCTGGCCCGCCAGACGCTGGAGG | |
| | | | AGACGCCGTCGCCGGCGCCCCGTACGGAGAACAA | |
| | | | GAGCTCGCCGACCTGCTCGACGCTATAGAAGACG | |
| | | | ACGAACAGTAA | |
| DQ186998.1 | ABD34293.1 | ORF2 | ATGGGCAAGGCTCTTAGGGTCTTCATTCTTAATATG | 626 |
| | | | TTCCTTGGCAGGGTTTACCGCCACAAGAAAAGGAA | |
| | | | AGTGCTACTGTCCACACTGCGAGCTCCACAGGCGT | |
| | | | CTCGCAGGGCTATGAGTTGGCGACCCCCGGTACA | |
| | | | CGATGCACCCGGCATCGAGCGCAATTGGTACGAG | |
| | | | GCCTGTTTCAGAGCCCACGCTGGGGCTTGTGGCT | |
| | | | GTGGCAATTTTATTATGCACCTTAATCTTCTGGCTG | |
| | | | GGCGTTATGGTTTTACTCCGGGGTCAGCGCCGCC | |
| | | | AGGTGGTCCTCCTCCGGGCACCCCGCAGATAAGA | |
| | | | AGAGCCAGACCTAGTCCCGCCGCACCCCAAGAGC | |
| | | | CCGCTGCTCTACCATGGCATGGGGATGGTGGAGA | |
| | | | TGGCGGCGCCGCTGGCCCGCCAGACGCTGGAGG | |
| | | | AGACGCCGTCGCCGGCGCCCCGTACGGAGAACAA | |
| | | | GAGCTCGCCGACCTGCTCGACGCTATAGAAGACG | |
| | | | ACGAACAGTAA | |
| DQ186999.1 | ABD34295.1 | ORF2 | ATGCACTTTTCTCGAATAAGCAGAAAGAAAAGGAA | 627 |
| | | | AGTGCTACTGCTTTGCGTGCCAGCAGCTAAGAAAA | |
| | | | AACCAACTGCTATGAGCTTCTGGAGACCTCCGGTG | |
| | | | CACAATGTCACGGGGATCCAGCGCCTGTGGTACG | |
| | | | AGTCCTTTCACCGTGGCCATGCTGCTTTTTGTGGTT | |
| | | | GTGGGGATCCTATACTTCACATTACTTCACTTGCTG | |
| | | | AGACATATGGCCATCCAACAGGCCCGAGACCTTCT | |
| | | | GGGTCATCGGGAATAGACCCCACTCCGCCCATCC | |
| | | | GTAGAGCCAGGCCTGCCCCGGCCGCTCCGGAACC | |
| | | | CTCACAGGTTGACTCCAGACCGGCCCTGCCATGG | |
| | | | CATGGAGATGGTGGAAGCGACGGAGGCGCTGGTG | |
| | | | GTTCCGCAAGCGGTGGACCCGTGGCAGACTTCGC | |
| | | | AGACGATGGCCTCGACCAGCTCGTCGCCGACCTA | |
| | | | GACGACGAAGAGTAA | |
| DQ187000.1 | ABD34297.1 | ORF2 | ATGCACTTTTCTCGAATAAGCAGAAAGAAAAGGAA | 628 |
| | | | AGTGCTACTGCTTTGCGTGCCAGCAGCTAAGAAAA | |
| | | | AACCAACTGCTATGAGCTTCTGGAGACCTCCGGTG | |
| | | | CACAATGTCACGGGGATCCAGCGCCTGTGGTACG | |
| | | | AGTCCTTTCACCGTGGCCATGCTGCTTTTTGTGGTT | |
| | | | GTGGGGATCCTATACTTCACATTACTTCACTTGCTG | |
| | | | AGACATATGGCCATCCAACAGGCCCGAGACCTTCT | |
| | | | GGGTCATCGGGAATAGACCCCACTCCGCCCATCC | |
| | | | GTAGAGCCAGGCCTGCCCCGGCCGCTCCGGAACC | |
| | | | CTCACAGGTTGACTCCAGACCGGCCCTGCCATGG | |
| | | | CATGGAGATGGTGGAAGCGACGGAGGCGCTGGTG | |
| | | | GTTCCGCAAGCGGTGGACCCGTGGCAGACTTCGC | |
| | | | AGACGATGGCCTCGACCAGCTCGTCGCCGACCTA | |
| | | | GACGACGAAGAGTAA | |
| DQ187001.1 | ABD34299.1 | ORF2 | ATGCACTTTTCTCGAATAAGCAGAAAGAAAAGGAA | 629 |
| | | | AGTGCTACTGCTTTGCGTGCCAGCAGCTAAGAAAA | |
| | | | AACCAACTGCTATGAGCTTCTGGAGACCTCCGGTG | |
| | | | CACAATGTCACGGGGATCCAGCGCCTGTGGTACG | |
| | | | AGTCCTTTCACCGTGGCCATGCTGCTTTTTGTGGTT | |
| | | | GTGGGGATCCTATACTTCACATTACTTCACTTGCTG | |
| | | | AGACATATGGCCATCCAACAGGCCCGAGACCTTCT | |
| | | | GGGTCATCGGGAATAGACCCCACTCCGCCCATCC | |
| | | | GTAGAGCCAGGCCTGCCCCGGCCGCTCTGGAACC | |
| | | | CTCACAGGTTGACTCCAGACCGGCCCTGCCATGG | |
| | | | CACGGAGATGGTGGAAGCGACGGAGGCGCTGGT | |
| | | | GGTTCCGCAAGCGGTGGACCCGTGGCAGACTTCG | |
| | | | CAGACGATGGCCTCGACCAGCTCGTCGCCGACCT | |
| | | | AAACGACGAAGAGTAA | |
| DQ187002.1 | ABD34301.1 | ORF2 | ATGCACTTTTCTCGAATAAGCAGAAAGAAAAGGAA | 630 |
| | | | AGTGCTACTGCTTTGCGTGCCAGCAGCTAAGAAAA | |
| | | | AACCAACTGCTATGAGCTTCTGGAGACCTCCGGTG | |
| | | | CACAATGTCACGGGGATCCAGCGCCTGTGGTACG | |
| | | | AGTCCTTTCACCGTGGCCATGCTGCTTTTTGTGGTT | |
| | | | GTGGGGATCCTATACTTCACATTACTTCACTTGCTG | |
| | | | AGACATATGGCCATCCAACAGGCCCGAGACCTTCT | |
| | | | GGGTCATCGGGAATAGACCCCACTCCGCCCATCC | |
| | | | GTAGAGCCAGGCCTGCCCCGGCCGCTCCGGAACC | |
| | | | CTCACAGGTTGACTCCAGACCGGCCCTGCCATGG | |
| | | | CATGGAGATGGTGGAAGCGACGGAGGCGCTGGTG | |
| | | | GTTCCGCAAGCGGTGGACCCGTGGCAGACTTCGC | |
| | | | AGACGATGGCCTCGACCAGCTCGTCGCCGACCTA | |
| | | | AACGACGAAGAGTAA | |
| DQ187003.1 | ABD34303.1 | ORF2 | ATGCACTTTTCTCGAATAAGCAGAAAGAAAAGGAA | 631 |
| | | | AGTGCTACTGCTTTGCGTGCCAGCAGCTAAGAAAA | |
| | | | AACCAACTGCTATGAGCTTCTGGAGACCTCCGGTG | |
| | | | CACAATGTCACGGGGATCCAGCGCCTGTGGTACG | |
| | | | AGTCCTTTCACCGTGGCCATGCTGCTTTTTGTGGTT | |
| | | | GTGGGGATCCTATACTTCACATTACTTCACTTGCTG | |
| | | | AGACATATGGCCATCCAACAGGCCCGAGACCTTCT | |
| | | | GGGTCATCGGGAATAGACCCCACTCCGCCCATCC | |
| | | | GTAGAGCCAGGCCTGCCCCGGCCGCTCCGGAACC | |
| | | | CTCACAGGTTGACTCCAGACCGGCCCTGCCATGG | |
| | | | CATGGAGATGGTGGAAGCGACGGAGGCGCTGGTG | |
| | | | GTTCCGCAAGCGGTGGACCCGTGGCAGACTTCGC | |
| | | | AGACGATGGCCTCGACCAGCTCGTCGCCGACCTA | |
| | | | GACGACGAAGAGTAA | |
| DQ187004.1 | ABD34304.1 | ORF2 | ATGTTTTTCGGTAGACATTGGCGAAAGAAAAGGGC | 632 |
| | | | ACTGTTACTGTCTAGCTTGCGAACTTCAAAGAAGAA | |
| | | | ACCACCTGCAATGAGCCAGTGGTGCCCGCCTGTG | |
| | | | CACAGCGTTCAGGGTCGCAACCACCAGTGGTATG | |
| | | | AAGCCTGCTACCGTGGCCATGCTGCTTATTGTGGC | |
| | | | TGTGGCGATTTTATTAGTCACCTTGTTGCTCTGGGT | |
| | | | AATCAGTTTGGCTTCAGGCCGGGTCCCCGAGCTCC | |
| | | | TGGCGCACCGGGGCTAGGGGGACCCCCCGTTCTG | |
| | | | CCCCGTAGAGCCCTGCCGGCACCCCCGGCTGAGG | |
| | | | CTCCGGAGCACCAGCAGGGCAACAACAACAACAA | |
| | | | CCAGCAGCTGCAGAGATGGCCTGGGGATGGTGGA | |
| | | | AACGCAGACGGCGCCGATGGTGGAGAGGCCTCTG | |
| | | | GAGGAGACGCCGCTTTGCCAGAAGACGACCTAGA | |
| | | | CGGCCTGCTCGCCGCCCTAGACGACGAAGAGTAA | |
| D0187005.1 | ABD34306.1 | ORF2 | ATGTTTTTCGGTAGGCATTGGCGAAAGAAAAGGGC | 633 |
| | | | ACTGTTACTGTCTAGCTTGCGAACTTCAAAGAAGAA | |
| | | | ACCACCTGCAATGAGCCAGTGGTGCCCGCCTGTG | |
| | | | CACAGCGTTCAGGGTCGCAACCACCAGTGGTATG | |
| | | | AAGCCTGCTACCGTGGCCATGCTGCTTATTGTGGC | |
| | | | TGTGGCGATTTTATTAGTCACCTTGTTGCTCTGGGT | |
| | | | AATCAGTTTGGCTTCGGGCCGGGTCCCCGAGCTC | |
| | | | CTGGCGCACCGGGGCTAGGGGGACCCCCCGTTCT | |
| | | | GCCCCGTAGAGCCCTGCCGGCACCCCCGGCTGAG | |
| | | | GCTCCGGAGCACCAGCAGGGCAACAACAACAACA | |
| | | | ACCAGCAGCTGCAGAGACGGCCTGGGGATGGTGG | |
| | | | AAACGCAGACGGCGCCGATGGTGGAGAGGCCTCT | |
| | | | GGAGGAGACGCCGCTTTGCCAGAAGACGACCTAG | |
| | | | ACGGCCTGCTCGCCGCCCTAGACGACGAAGAGTA | |
| | | | A | |
| D0187007.1 | ABD34309.1 | ORF2 | ATGTTTTTCGGTAGGCATTGGCGAAAGAAAAGGGC | 634 |
| | | | ACTGTTACTGTCTAGCTTGCGAACTTCAAAGAAGAA | |
| | | | ACCACCTGCAATGAGCCAGTGGTGCCCGCCTGTG | |
| | | | CACAGCGTTCAGGGTCGCAACCACCAGTGGTATG | |
| | | | AAGCCTGCTACCGTGGCCATGCTGCTTATTGTGGC | |
| | | | TGTGGCGATTTTATTAGTCACCTTGTTGCTCTGGGT | |
| | | | AATCAGTTTGGCTTCAGGCCGGGTCCCCGAGCTCC | |
| | | | TGGCGCACCGGGGCTAGGGGGACCCCCCGTTCTG | |
| | | | CCCCGTAGAGCCCTGCCGGCACCCCCGGCTGAGG | |
| | | | CTCCGGAGCACCAGCAGGGCAACAACAACAACAA | |
| | | | CCAGCAGCTGCAGAGATGGCCTGGGGATGGTGGA | |
| | | | AACGCAGACGGCGCCGATGGTGGAGAGGCCTCTG | |
| | | | GAGGAGACGCCGCTTTGCCAGAAGACGACCTAGA | |
| | | | CGGCCTGCTCGCCGCCCTAGACGACGAAGAGTAA | |
| EF538879.1 | ABU55886.1 | ORF2 | ATGCACTTTTCTCGAATAAGCAGAAAGAAAAGGAA | 635 |
| | | | AGTGCTACTGCTTTGCGTGCCAGCAGCTAAGAAAC | |
| | | | AACCAACTGCTATGAGCTTCTGGAGACCTCCGATA | |
| | | | CACAATGTCACGGGGATCCAGCGCCTGTGGTACG | |
| | | | AGTCCTTTCACCGTGGCCATGCTGCTTTTTGTGGTT | |
| | | | GTGGGGATCCTATACTTCACATTACTGCACTTGCT | |
| | | | GAGACATATGGCCATCCAACAGGCCCGAGACCTTC | |
| | | | TGGGTCATCGGGAATAGACCCCACTCCCCCAATCC | |
| | | | GTAGAGCCAGGCCCGCCCCGGCCGCTCCGGAGC | |
| | | | CCTCACAGGCTGAGTCCAGACCGGCCCTGCCATG | |
| | | | GCATGGAGATGGTGGAAGCGACGGAGGCGCTGGT | |
| | | | GGTTCCGCAAGCGGTGGACCCGTGGCAGACTTCG | |
| | | | CAGACGATGGCCTCGACCAGCTCGTCGCCGCCCT | |
| | | | AGACGACGAAGAGTAA | |
| FJ426280.1 | ACK44072.1 | ORF2 | ATGTTTCTCGGCAGGGTGTGGAGGAAACAGAAAAG | 636 |
| | | | GAAAGTGCTTCTGCTGGCTGTGCGAGCTACACAGA | |
| | | | AAACATCTTCCATGAGTATCTGGCGTCCCCCTCTC | |
| | | | GGGAATGTCTCCTACAGGGAGAGAAATTGGCTTCA | |
| | | | GGCCGTCGAAGGATCCCACAGTTCCTTTTGTGGCT | |
| | | | GTGGTGATTTTATTCTTCATCTTACTAATTTGGCTG | |
| | | | CACGCTTTGCTCTTCAGGGGCCCCCGCCGGAGGG | |
| | | | TGGTCCTCCTCGGCCGAGGCCGCCGCTCCTGAGA | |
| | | | GCGCTGCCGGCCCCCGAGGTCCGCAGGGAAACG | |
| | | | CGCACAGAGAACCCGGGCGCCTCCGGTGAGCCAT | |
| | | | GGCCTGGCGATGGTGGTGGCAGAGACGATGGCG | |
| | | | CCGCCGCCCGTGGCCCCGCAGACGGTGGAGACG | |
| | | | CCTACGACGCCGGAGACCTCGACGACCTGTTCGC | |
| | | | CGCCGTCGAAGACGAGCAACAGTAA | |
| FJ392105.1 | ACR20258.1 | ORF2 | CTGCCACTGCTACCTGTGCCAGCTACACCGCAAGA | 637 |
| | | | ACGGCCTAGTCGTGCGCCCCTGATGGCCTGCGGA | |
| | | | CCCAGAGGATGGATGCCCCCCAACTTCGGGGGAC | |
| | | | ACGACAGAGAAAATGCTTGGTGCAAATCTGTTAAA | |
| | | | TTGTCTCATGATGCTTTCTGTGGCTGCGACGATCC | |
| | | | TCTTACCCATCTTGCTGCTCTGCTACCAAGCAGAC | |
| | | | AAGCTTCTCGTCAGAATACTCCTTCTGCTCCACCTC | |
| | | | CGCGCCCCCCGCCGCCGACCCCGAGGCAGGGCC | |
| | | | AGGGCTCTGGGCCGCCTCAGGGGCGAATCAGACC | |
| | | | GTCCTGGTCCCTCCCGGTGACCCCACCCGCTGAC | |
| | | | GAGCCATGGCAGCCTGGTGGTGGGGCAGGCGGA | |
| | | | GACGCTGGCGCAGGTGGAGGCGCCGCCGCCTCC | |
| | | | CTCGCCGCCGCCGCTGGCGACGGAGGAGACGGT | |
| | | | GGCCCAGAAGACGCAGGCGGAGATGGCCGCGCA | |
| | | | GACGCAGACGTCGCAGACCTGCTCGCCGCCCTAG | |
| | | | AGGAGACGCAGACGCCGAAGGGTAA | |
| FJ392107.1 | ACR20261.1 | ORF2 | GATCCTCTTACCCATCTTGCTGCTCTGCTACCAGG | 638 |
| | | | CAGACAAGCTTCTCGTCAGAATACTCCTTCTGCTC | |
| | | | CACCTCCGCGCCCCCCGCCGCCGACCCCGAGGC | |
| | | | AGGGCCAGGGCTCTGGGCCGCCTCAGGGGCGAA | |
| | | | TCAGACCGTCCTGGTCCCTCCCGGTGACCCCACC | |
| | | | CGCTGACGAGCCATGGCAGCCTGGTGGTGGGGCA | |
| | | | GGCGGAGACGCTGGCGCAGGTGGAGGCGCCGCC | |
| | | | GCCTCCCTCGCCGCCGCCGCTGGCGACGGAGGA | |
| | | | GACGGTGGCCCAGAAGACGCAGGCGGAGATGGC | |
| | | | CGCGCAGACGCAGACGTCGCAGACCTGCTCGCCG | |
| | | | CCCTAGAAGGAGACGCAGACGCCGAAGGGTAA | |
| FJ392108.1 | ACR20263.1 | ORF2 | TCTCATGATGCTTTCTGTGGCTGCGACGATCCTCTT | 639 |
| | | | ACCCATCTTGCTGCTCTGCTACCAGGCAGACAAGC | |
| | | | TTCTCGTCAGAATACTCCTTCTGCTCCACCTCCGC | |
| | | | GCCCCCCGCCGCCGACCCCGAGGCAGGGCCAGG | |
| | | | GCTCTGGGCCGCCTCAGGGGCGAATCAGACCGTC | |
| | | | CTGGTCCCTCCCGGTGACCCCACCCGCTGACGAG | |
| | | | CCATGGCAGCCTGGTGGTGGGGCAGGCGGAGAC | |
| | | | GCTGGCGCAGGTGGAGGCGCCGCCGCCTCCCTC | |
| | | | GCCGCCGCCGCTGGCGACGGAGGAGACGGTGGC | |
| | | | CCAGAAGACGCAGGCGGAGATGGCCGCGCAGAC | |
| | | | GCAGACGTCGCAGACCTGCTCGCCGCCCTAGAAG | |
| | | | GAGACGCAGACGCCGAAGGGTAA | |
| FJ392111.1 | ACR20268.1 | ORF2 | CAAGAACGGCCTAGTCGTGCGCCCCTGATGGCCT | 640 |
| | | | GCGGACCCAGAGGATGGATGCCCCCCAACTTCGG | |
| | | | GGGACACGACAGAGAAAATGCTTGGTGCAAATCTG | |
| | | | TTAAATTGTCTCATGATGCTTTCTGTGGCTGCGACG | |
| | | | ATCCTCTTACCCATCTTGCTGCTCTGCTACCAGGC | |
| | | | AGACAAGCTTCTCGCCAGAATACTCCTTCTGCTCC | |
| | | | ACCTCCGCGCCCCCCGCCGCCGACCCCGAGGCA | |
| | | | GGGCCAGGGCTCTGGGCCGCCTCAGGGGCGAAT | |
| | | | CAGACCGTCCTGGTCCCTCCCGGTGACCCCACCC | |
| | | | GCTGACGAGCCATGGCAGCCTGGTGGTGGGGCAG | |
| | | | GCGGAGACGCTGGCGCAGGTGGAGGCGCCGCCG | |
| | | | CCTCCCTCGCCGCCGCCGCTGGCGACGGAGGAG | |
| | | | ACGGTGGCCCAGAAGACGCAGGCGGAGATGGCC | |
| | | | GCGCAGACGCAGACGTCGCAGACCTGCTCGCCGC | |
| | | | CCTAGAAGGAGACGCAGACGCCGAAGGGTAA | |
| FJ392112.1 | ACR20270.1 | ORF2 | CTGCTACCTGTGCCAGCTACACCGCAAGAACGGC | 641 |
| | | | CTAGTCGTGCGCCCCTGATGGCCTGCGGACCCAG | |
| | | | AGGATGGATGCCCCCCAACTTCGGGGGACACGAC | |
| | | | AGAGAAAATGCTTGGTGCAAATCTGTTAAATTGTCT | |
| | | | CATGATGCTTTCTGTGGCTGCGACGATCCTCTTAC | |
| | | | CCATCTTGCTGCTCTGCTACCAGGCAGACAAGCTT | |
| | | | CTCGTCAGAATACTCCTTCTGCTCCACCTCCGCGC | |
| | | | CCCCCGCCGCCGACCCCGAGGCAGGGCCAGGGC | |
| | | | TCTGGGCCGCCTCAGGGGCGAATCAGACCGTCCT | |
| | | | GGTCCCTCCCGGTGACCCCACCCGCTGACGAGCC | |
| | | | ATGGCAGCCTGGTGGTGGGGCAGGCGGAGACGC | |
| | | | TGGCGCAGGTGGAGGCGCCGCCGCCTCCCTCGC | |
| | | | CGCCGCCGCTGGCGACGGAGGAGACGGTGGCCC | |
| | | | AGAAGACGCAGGCGGAGATGGCCGCGCAGACGC | |
| | | | AGACGTCGCAGACCTGCTCGCCGCCCTAGAAGGA | |
| | | | GACGCAGACGCCGAAGGGTAA | |
| FJ392113.1 | ACR20271.1 | ORF2 | ATGTTCCTCGGCAGGCCGTGGAGAAAGAGGAGGG | 642 |
| | | | CGGCCGGGAAGAAAGGGCCACTGCCACTGCAAGC | |
| | | | TGTGCGAGCTGCATCGCAGGAACGGTCTGACAGT | |
| | | | GCACCGCTGATGGCCTGCGGACCCCGGGGATGGA | |
| | | | TGCCCCCGAACTTCGGGGGACACGAGAGAGAAAA | |
| | | | TGCCTGGAGCCAGTCTGTTGTACTGTCTCATGATG | |
| | | | CTTTCTGTGGCTGCGACGATCCTGCTACCCATCTT | |
| | | | ACTGCTCTGCTATCAGGTAGACAAGCTTCTCGTCA | |
| | | | GAGTACTCCTTCTGCTCCACCTCCGCGCCCCCCGC | |
| | | | CGCCGTCCCCGAGGCAGGGCCAGGGGTCTCGGT | |
| | | | CACCTCCGGGGCGAATCAGACCATCCTGGTCCCT | |
| | | | CCCGGTAGCCCCGCCGAGTGAAGGGCCATGGCTG | |
| | | | CCTGGTGGTGGGGCAGGAGGCGGCGATGGCGCC | |
| | | | GGTGGAGACGGCGCCGTCTCCCTCGCCGCCGCC | |
| | | | GCTGGTGACGGAGGAGACGGTGGCCCAGGAGGC | |
| | | | GTAGGCGGAGATGGCCGCGGAGACGCAGACGTC | |
| | | | GCAGACCTGCTCGCCGCCTTAGAAGGAGACGTCG | |
| | | | ACGCAGAAGGGTAA | |
| FJ392114.1 | ACR20273.1 | ORF2 | ATGTTCCTCGGCAGGCCGTGGAGAAAGAGGAGGG | 643 |
| | | | CGGCCGGGAAGAAAGGGCCACTGCCACTGCAAGC | |
| | | | TGTGCGAGCTGCATCGCAGGAACGGTCTCACAGT | |
| | | | GCACCGCTGATAGCCTGCGGACCCCGGGGATGGA | |
| | | | TGCCCCCGAACTTCGGGGGACACGAGAGGGAAAA | |
| | | | TGCCTGGAGCCAGTCTGTTGTACTGTCTCATGATG | |
| | | | CTTTCTGTGGTTGCGACGATCCTGCTACCCATCTTA | |
| | | | CTACTCTGCTATCACGCAGACAAGCTTCTCGTCAG | |
| | | | AGTACTCCTTCTGCTCCACCTCCGCGCCCCCCGCC | |
| | | | GCCGTCCCCGAGGCAGGGCCAGGGGTCTCGGTC | |
| | | | GCCTCCGGGACGAATCAGACCATCCTGGTCCCTC | |
| | | | CCGGTAGCCCCGCCGAGTGAAGGGCCATGGCTGC | |
| | | | CTGGTGGTGGGGCAGGAGGCGGCGATGGCGCCG | |
| | | | GTGGAGACGGCGCCGTCTCCCTCGCCGCCGCCGC | |
| | | | TGGCGACGGAGGAGACGGTGGCCCAGGAGGCGT | |
| | | | AGGCGGAGATGGCCGCGGAGACGCAGACGTCGC | |
| | | | GGACCTGCTCGCCGCCTTAGAAGGAGACGTCGAC | |
| | | | GCAGAAGGGTAA | |
| FJ392115.1 | ACR20275.1 | ORF2 | ATGTTCCTCGGCAGGCCGTGGAGAAAGAGGAGAG | 644 |
| | | | CGGCAGGGAAGAAAGGGCCACTGCCACTGCAAGC | |
| | | | TGTGCGGGCTGCATCGCAGGAACGGTCTCACAGT | |
| | | | GCACCGCTGATGGCCTGCGGACCCCGGGGATGGA | |
| | | | TGCCCCCGAACTTCGGGGGACACGAGAGAGAAAA | |
| | | | TGCCTGGAGCCAGTCTGTTGTACTGTCTCATGATG | |
| | | | CTTTCTGTGGTTGCGACGATCCTGCTACCCATCTTA | |
| | | | CTACTCTGCTATCACGCAGACAAGCTTCTCGTCAG | |
| | | | AGTACTCCTTCTGCTCCACCTCCGCGCCCCCCGCC | |
| | | | GCCGTCCCCGAGGCAGGGCCAGGGGTCTCGGTC | |
| | | | GCCTCCGGGGCGAATCAGACCATCCTGGTCCCTC | |
| | | | CCGGTAGCCCCGCCGAGTGAAGGGCCATGGCTGC | |
| | | | YTGGTGGTGGGGCAGGAGGCGGCGATGGCGCCG | |
| | | | GTGGAGACGGCGCCGTYTCCCTCGCCGCCGCCGC | |
| | | | TGGCGACGGAGGAGACGGTGGCCCAGGAGGCGT | |
| | | | AGGCGGAGATGGCCGCGGAGACGCAGACGTCGC | |
| | | | AGACCTGCTCGCCGCCTTAGAAGGAGACGTCGAC | |
| | | | GCAGAAGGGTAA | |
| GU797360.1 | ADO51764.1 | ORF2 | ATGGCTGAGTTTATGCTGCCCGTCCGCAGAGAGG | 645 |
| | | | AGCCACGGCGGGGGATCCGAACGTCCCGAGGGC | |
| | | | GGGTGCCGGAGGTGAGTTTACACACCGCAGTCAA | |
| | | | GGGGCAATTCGGGCTCGGGACTGGCCGGGCTATG | |
| | | | GGCAAGGCTCTTAAAAAAGCCATGTTTCTCGGTAA | |
| | | | ATTACACAGAAAGAAGAGGGCACTGTCACTGCACG | |
| | | | GCCTGCCAGCTACAAAGAAAAAACCACCTCCTGAT | |
| | | | ATGAACTACTGGAGGCCGCCTGTGCACAATGTCCC | |
| | | | GGGGCTCGAACGCCTCTGGTACGAGTCCGTGCAT | |
| | | | CGTAGCCATGCTGCTGTTTGTGGTTGTGGGGATTT | |
| | | | TGTACGCCATATTACTGCTCTGGCTGAGAGATACG | |
| | | | GCCACCCTGGGGGACCGCGCGCGCCTGGGGCAC | |
| | | | CGGGAATAGGGGGCAATCCCAATTCTCCCCCGAT | |
| | | | CCGTCGAGCCCGCCACCCGGCGGCCGCTCCGGA | |
| | | | GCCCCCAGCAGGTAACCAGCCTCCGGCCCTGCCA | |
| | | | TGGCATGGGGATGGTGGAAACGAAGGCGCAAGTG | |
| | | | GTGGTGGAGACGACGCTGGACTCGTGGCCGACTT | |
| | | | CGCAAACGACGGGCTAGACGAGCTGGTCGCCGCC | |
| | | | CTCGACGAAGAAGAGTCCCAAAAAACCCAGGGTC | |
| | | | GACCTCGGGCCAATCCAACAGCAAGAAAGGCCCT | |
| | | | CCGATTCACTCCAAAGAGAATCGAGGCCGTGGGA | |
| | | | GACCAGCGAAGAAGAGAGCGAAGCAGAAGTCCAG | |
| | | | CAAGAAGAGACGGAGGAGGTGCCCCTCAGACAGC | |
| | | | AACTCCTCCACAACCTCAGAGAGCAGCAGCAACTC | |
| | | | CGAAAGGGCCTCCAGTGCGTCTTCCAGCAGCTAAT | |
| | | | AAAGACGCAGCAGGGGGTTCACATAGACCCATCC | |
| | | | CTACTGTAGGCCCCAGTCAGTGGCTCTTCCCCGAG | |
| | | | AGAAAGCCTAAACCCCCTCCATCGGCCGGAGACT | |
| | | | GGGCCATGGAGTACCTAGCTTGCAAGATATTCAAC | |
| | | | AGGCCGCCCCGCACTCACCTTACAGACCCTCCTTT | |
| | | | CTACCCCTACTGCAAAAACAATTACAATGTAACCTT | |
| | | | TCAGCTCAACTACAAATAA | |
| GU797360.1 | AD051763.1 | ORF2 | ATGGCTGAGTTTATGCTGCCCGTCCGCAGAGAGG | 646 |
| | | | AGCCACGGCGGGGGATCCGAACGTCCCGAGGGC | |
| | | | GGGTGCCGGAGGTGAGTTTACACACCGCAGTCAA | |
| | | | GGGGCAATTCGGGCTCGGGACTGGCCGGGCTATG | |
| | | | GGCAAGGCTCTTAAAAAAGCCATGTTTCTCGGTAA | |
| | | | ATTACACAGAAAGAAGAGGGCACTGTCACTGCACG | |
| | | | GCCTGCCAGCTACAAAGAAAAAACCACCTCCTGAT | |
| | | | ATGAACTACTGGAGGCCGCCTGTGCACAATGTCCC | |
| | | | GGGGCTCGAACGCCTCTGGTACGAGTCCGTGCAT | |
| | | | CGTAGCCATGCTGCTGTTTGTGGTTGTGGGGATTT | |
| | | | TGTACGCCATATTACTGCTCTGGCTGAGAGATACG | |
| | | | GCCACCCTGGGGGACCGCGCGCGCCTGGGGCAC | |
| | | | CGGGAATAGGGGGCAATCCCAATTCTCCCCCGAT | |
| | | | CCGTCGAGCCCGCCACCCGGCGGCCGCTCCGGA | |
| | | | GCCCCCAGCAGGTAACCAGCCTCCGGCCCTGCCA | |
| | | | TGGCATGGGGATGGTGGAAACGAAGGCGCAAGTG | |
| | | | GTGGTGGAGACGACGCTGGACTCGTGGCCGACTT | |
| | | | CGCAAACGACGGGCTAGACGAGCTGGTCGCCGCC | |
| | | | CTCGACGAAGAAGAGTTGTTAGAGACCCCTGCACT | |
| | | | CAGCCCACCTTCGAACTGCCCGGAGCCAGTACGC | |
| | | | AGCCTCCACGAATACAAGTCACGGACCCGAAACTC | |
| | | | CTCGGTCCCCACTACTCATTCCACTCGTGGGACCT | |
| | | | CAGACGTGGCTACTATAGCACAAAGAGTATTAAAC | |
| | | | GAATGTCAGAACACGAAGAACCTTCTGAGTTTATTT | |
| | | | TCCCAGGTCCCAAAAAACCCAGGGTCGACCTCGG | |
| | | | GCCAATCCAACAGCAAGAAAGGCCCTCCGATTCAC | |
| | | | TCCAAAGAGAATCGAGGCCGTGGGAGACCAGCGA | |
| | | | AGAAGAGAGCGAAGCAGAAGTCCAGCAAGAAGAG | |
| | | | ACGGAGGAGGTGCCCCTCAGACAGCAACTCCTCC | |
| | | | ACAACCTCAGAGAGCAGCAGCAACTCCGAAAGGG | |
| | | | CCTCCAGTGCGTCTTCCAGCAGCTAA | |
| GU797360.1 | AD051762.1 | ORF2 | ATGGCTGAGTTTATGCTGCCCGTCCGCAGAGAGG | 647 |
| | | | AGCCACGGCGGGGGATCCGAACGTCCCGAGGGC | |
| | | | GGGTGCCGGAGGTGAGTTTACACACCGCAGTCAA | |
| | | | GGGGCAATTCGGGCTCGGGACTGGCCGGGCTATG | |
| | | | GGCAAGGCTCTTAAAAAAGCCATGTTTCTCGGTAA | |
| | | | ATTACACAGAAAGAAGAGGGCACTGTCACTGCACG | |
| | | | GCCTGCCAGCTACAAAGAAAAAACCACCTCCTGAT | |
| | | | ATGAACTACTGGAGGCCGCCTGTGCACAATGTCCC | |
| | | | GGGGCTCGAACGCCTCTGGTACGAGTCCGTGCAT | |
| | | | CGTAGCCATGCTGCTGTTTGTGGTTGTGGGGATTT | |
| | | | TGTACGCCATATTACTGCTCTGGCTGAGAGATACG | |
| | | | GCCACCCTGGGGGACCGCGCGCGCCTGGGGCAC | |
| | | | CGGGAATAGGGGGCAATCCCAATTCTCCCCCGAT | |
| | | | CCGTCGAGCCCGCCACCCGGCGGCCGCTCCGGA | |
| | | | GCCCCCAGCAGGTAACCAGCCTCCGGCCCTGCCA | |
| | | | TGGCATGGGGATGGTGGAAACGAAGGCGCAAGTG | |
| | | | GTGGTGGAGACGACGCTGGACTCGTGGCCGACTT | |
| | | | CGCAAACGACGGGCTAGACGAGCTGGTCGCCGCC | |
| | | | CTCGACGAAGAAGAGTAA | |
| AB030487.1 | BAA90404.1 | ORF2a | ATGGCTGAGTTTTCCACGCCCGTCCGCAGCGAGAT | 648 |
| | | | CGCGACGGAGGAGCGATCGAGCGTCCCGAGGGC | |
| | | | GGGTGCCGAAGGTGAGTTTACACACCGGAGTCAA | |
| | | | GGGGCAATTCGGGCTCGGGACTGGCCGGGCTATG | |
| | | | GGCAAGGCTCTTAA | |
| AB030488.1 | BAA90407.1 | ORF2a | ATGGCTGAGTTTTCCATGCCCGTCCGCAGCGGTGA | 649 |
| | | | AGCCACGGAGGGAGCTCAGCGCGTCCCGAGGGC | |
| | | | GGGTGCCGAAGGTGAGTTTACACACCGAAGTCAA | |
| | | | GGGGCAATTCGGGCTCGGGACTGGCCGGGCTATG | |
| | | | GGCAAGGCTCTTAA | |
| AB030489.1 | BAA90410.1 | ORF2a | ATGGCTGAGTTTTCTATGCCCGTCCGCAGCGGCGA | 650 |
| | | | AGCCACGGAGGGAGCTCAGCGCGTCCCGAGGGC | |
| | | | GGGTGCCGGAGGTGAGTTTACACACCGAAGTCAA | |
| | | | GGGGCAATTCGGGCTCGGGACTGGCCGGGCTATG | |
| | | | GGCAAGGCTCTTAA | |
| AB030487.1 | BAA90405.1 | ORF2b | ATGCACTTTTCTAGGATATCCAGAAAGAAAAGGCTA | 651 |
| | | | CTGCTACTGCAAACAGTGCCAGCTCCACAGAAAAC | |
| | | | TTTCAAACTTTTAAGAGGTATGTGGAGTCCTCCCAC | |
| | | | TGACGATGAACGTGTCCGCGAGCGAAAATGGTTCC | |
| | | | TCGCAACTGTTTATTCTCACTCTGCTTTCTGTGGCT | |
| | | | GCAATGATCCTGTCGGTCACCTCTGTCGCTTGGCT | |
| | | | ACTCTTTCTAACCGTCCGGAGAACCCGGGACCCTC | |
| | | | CGGGGGACGTCGTGCTCCTTCGATCGGGGTCCTA | |
| | | | CCCGCTCTCCCGGCTGCTACCGAGCAGCCCGGTG | |
| | | | ATCGAGCACCATGGCCTATGGGTGGTGGAGGAGA | |
| | | | CGCCGCAGAAGGTGGAAGAGATGGAGGAGAAGGC | |
| | | | CCAGGTGGAGACGCCCATGGAGGACCCGCAGACG | |
| | | | CAGACCTGCTAGACGCCGTGGACGCCGCAGAACA | |
| | | | GTAA | |
| AB030488.1 | BAA90408.1 | ORF2b | ATGCACTTTTCTAGGATACGCAGAAAGAAAAGGCT | 652 |
| | | | ACTGCTACTGCAAACAGTGCCAGCTCCACAGAAAA | |
| | | | CTCTCAAACTTTTAAAAGGTATGTGGAGTCCTCCCA | |
| | | | CCGACGATGAACGTGTCCGCGAGCGAAAATGGTT | |
| | | | CCTCGCAACTATTTATTCTCACTCTACTTTCTGTGG | |
| | | | CTGCAATGATCCTGTCGGTCACTTCTGTCGCCTGG | |
| | | | CTACTCTGTCTAACCGCCCGGAAAACCCGGGACC | |
| | | | CTCCGGAGGACGTAGTGCTCCTCAGATCGGGCTC | |
| | | | CTACCCGCTCTCCCGGCTGCTCCCGAGCAACCCG | |
| | | | GTGATCGAGCACCATGGCTTATGGGTGGTGGAGG | |
| | | | AGACGCCGCAGGAGGTGGAAGAGATGGAGGAGAA | |
| | | | GGCCCAGGTGGAGACGCCCATGGAGGACCCGCA | |
| | | | GACGCAGACCTGCTGGACGCCGTGGACGCCGCAG | |
| | | | AACAGTAA | |
| AB030489.1 | BAA90411.1 | ORF2b | ATGCACTTTTCTAGGATACACAGAAAGAAAAGGCT | 653 |
| | | | ACTGCCACTGCAAACAGTGCCAACTCCACAGAAAA | |
| | | | CTCTCAAACTTTTAAAAGGTATGTGGAGTCCTCCCA | |
| | | | CCGACGATGAACGTGTCCGCGAGCGAAAATGGTT | |
| | | | CCTCGCAACTATCTATTCTCACTCTACTTTCTGTGG | |
| | | | CTGCAATGATCCTGTCGCTCATTTCTGTCGCCTGG | |
| | | | CTACTCTCTCTAACCGCCCGGAAAACCCGGGACCC | |
| | | | TCCGGAGGACGTAGTGCTCCTCAGATCGGGCTCC | |
| | | | TACCCGCTCTCCCGGCTGCTCCCGAGCAACCCGG | |
| | | | TGATCGAGCCCCATGGCCTATGGGTGGTGGAGGA | |
| | | | GACGCCGCAGGAGGTGGAAGAGATGGAGGAGAA | |
| | | | GGCCCAGGTGGAGACGCCGCTGGAGGACCCGCA | |
| | | | GACGCAGACCTGCTGGACGCCGTAGACGCCGCAG | |
| | | | AACAGTAA | |
| AB038340.1 | BAA90824.1 | ORF2s | ATGTTTATTGGCAGGCATTACAGAAAGAAAAGGGC | 654 |
| | | | GCTGTCACTGTGTGCTGTGCGAACAACAAAGAAGG | |
| | | | CTTGCAAACTACTAATAGTAATGTGGACCCCACCT | |
| | | | CGCAATGATCAACAGTACCTTAACTGGCAATGGTA | |
| | | | CTCAAGTGTACTTAGCTCCCACGCTGCTATGTGCG | |
| | | | GGTGTCCCGACGCTGTCGCTCATTTTAATCATCTT | |
| | | | GCTTCTGTGCTTCGTGCCCCGCAAAACCCACCCCC | |
| | | | TCCCGGTCCCCAGCGAAACCTGCCCCTCCGACGG | |
| | | | CTGCCGGCTCTCCCGGCTGCGCCAGAGGCGCCCG | |
| | | | GAGATAGAGCACCATGGCCTATGGCTGGTGGCGC | |
| | | | CGAAGGAGAAGACGGTGGCGCAGGTGGAGACGC | |
| | | | AGACCATGGAGGCGCCGCTGGAGGACCCGAAGAC | |
| | | | GCAGACCTGCTAGACGCCGTGGCCGCCGCAGAAA | |
| | | | CGTAA | |
| AB038340.1 | BAA90826.1 | ORF3 | ATGTTTGGTGACCCCAAACCTTACAACCCTTCCAGT | 655 |
| | | | AATGACTGGAAAGAGGAGTACGAGGCCTGTAGAAT | |
| | | | ATGGGACAGACCCCCCAGAGGCAACCTAAGAGAC | |
| | | | ACCCCTTTCTACCCCTGGGCCCCCAAGGAAAACCA | |
| | | | GTACCGTGTAAACTTTAAACTTGGATTTCAATAA | |
| AB038622.1 | BAA93587.1 | ORF3 | ATGATGAATATGTTGCAGGGCCTTTACCAAGAAAA | 656 |
| | | | AGAAACAAATTCGATACCAGAGCCCAAGGGCTGCA | |
| | | | AACCCCCGAAAAAGAAAGCTACACTTTACTCCAAG | |
| | | | CCCTCCAAGAGTCGGGGCAAGAGACCAGCTCAGA | |
| | | | AGACCAAGAACAAGCACCCCAAGAAAAAGAGGGT | |
| | | | CAGAAGGAAGCGCTCATGGAGCAGCTCCAGCTCC | |
| | | | AGAAACAGCACCAGCGAGTCCTCAAGCGAGGCCT | |
| | | | CAAACTCCTCCTCGGAGACGTCCTCCGACTCCGGA | |
| | | | GAGGAGTCCACTGGGACCCCCTCCTGTCATAATTC | |
| | | | AGGGCCCCTCTATCCCAGACCTGCTTTTCCCTAA | |
| AB038623.1 | BAA93590.1 | ORF3 | ATGATGAATATGTTGCAGGGCCTTTACCAAGAAAA | 657 |
| | | | AGAAACAAGTTCGATACCAGAGCCCAAGGGCTCCA | |
| | | | AAGCCCCGAAAAAGAAAGCTACACTTTACTCCAAG | |
| | | | CCCTCCAAGAGTCGGGGCAAGAGAGCAGCTCAGA | |
| | | | AGACCAAGAACAAGCACCCCAAGAAAAAGAGGGT | |
| | | | CAGAAGGAAGCGCTCATGGAGCAGCTCCAGCTCC | |
| | | | AGAAACAGCACCAGCGAGTCCTCAAGCGAGGCCT | |
| | | | CAAACTCCTCCTCGGAGACGTTCTCCGACTCCGGA | |
| | | | GAGGAGTACACTGGGACCCCCTCCTGTCATAATTC | |
| | | | AGGGCCCCTCTATCCCAGACCTACTTTTCCCTAA | |
| AB038624.1 | BAA93593.1 | ORF3 | ATGATGAATATGTTGCAGGGCCTTTACCAAGAAAA | 658 |
| | | | AGAAACAAGTTCGATACCAGAGCCCAAGGGCTCCA | |
| | | | AAGCCCCGAAAAAGAAAGCTACACTTTACTCCAAG | |
| | | | CCCTCCAAGAGTCGGGGCAAGAGACGAGCTCAGA | |
| | | | AGACCAAGAACAAGCACCCCAAGAAAAAGAGGGT | |
| | | | CAGAAGGAAGCGCTCATGGAGCAGCTCCAGCTCC | |
| | | | AGAAACAGCACCAGCGAGTCCTCAAGCGAGGCCT | |
| | | | CAAACTCCTCCTCGGAGACGTTCTCCGACTCCGGA | |
| | | | GAGGAGTACACTGGGACCCCCTCCTGTCATAATTC | |
| | | | AGGGCCCCTCTATCCCAGACCTGCTTTTCCCTAA | |
| AB050448.1 | BAB19926.1 | ORF3 | ATGAGCTTTGTAGAACCCTTACTAACCAGCACCCA | 659 |
| | | | CAGAGAGATAGCATACTACCATGGCTGTGTTCAGA | |
| | | | TGCACAAAGCCTTCTGTGGGTGTGACAACTTTCTTA | |
| | | | CCCACCTGCAACGCATAACAACATACATCTCTGCT | |
| | | | AACCAACACACTCCACCCAGCACACCCTCAAACAC | |
| | | | CCTCCGTAGAGCCCGGGCCCTGCCCGCGGCTCCG | |
| | | | GAGCCAGCTCCATGGCGTGGACCTGGTGGTGGCA | |
| | | | GAGGAGGCGCCGAAGGTGGCCGTGGAGAAGGAG | |
| | | | AAGGTGGAGAAGACTACGCACAAGAAGACCTAGA | |
| | | | CGCCTTGTTCGACGCCGTCGCAAGAGATACAGAGT | |
| | | | TATCAGAAACCCTTGTAAAACAGAAGGACACGATC | |
| | | | TCCCTCACACCAGTAGACTCCATCGCGACTTACAA | |
| | | | GTTGTTGACCCACACACCGTGGGCCCCCAATGGG | |
| | | | CGCTCCACACCTGGGACTGGCGACGTGGACTCTTT | |
| | | | GGTTCAGAGGCTATCAAAAGAGTGTCTGAACAACA | |
| | | | AGTACATGATGAACTGTATTACCCACCTTCAAAGAA | |
| | | | ACCTCGATTCCTCCCTCCAATATCAGGCCTCCAAG | |
| | | | AGCAAGAAAGAGACTACAGTTCGCAGGAGGAGAA | |
| | | | AGAACAGTCCTCCTCAGAAGAAGAGACGGACCCG | |
| | | | AAGAAAAAAGAGCAAAAACAGCAGCAGCGACTCCA | |
| | | | CCTCCAGTTCCAAGAGCAGCAGCGACTCGGAAAC | |
| | | | CAACTCCGACTCATCTTCCGAGAGCTACAGAAAAC | |
| | | | CCAAGCGGGTCTCCACTTAA | |
| AF371370.1 | AAK54733.1 | ORF3 | ATGGCGTGGTCGTGGTGGTGGAGGCGAAGGAAAC | 660 |
| | | | GCTGGTGGCCGCGCAGAAGGAGGCGATGGAGAA | |
| | | | GGCTACGAACCCGAAGAACTGGAAGAGCTGTTCC | |
| | | | GCGCCGCCGCCGCCGACGACGAGTAAGGAGGCG | |
| | | | CCGGTGGGGGAGGCGACCGCGTAGGAGACGGGT | |
| | | | GTACTATAAGAGACGCAGACGAAAGACTGGCAGAC | |
| | | | TGTATAGAAAGCCTAAAAAAAAACTAGTACTGACTC | |
| | | | AATGGCACCCCACTACAGTTAGAAACTGCTCCATA | |
| | | | CGGGGCTTAGTGCCCCTAGTCCTCTGCGGACACA | |
| | | | CACAGGGAGGCAGAAACTTTGCTTTGAGGAGCGAT | |
| | | | GACTACCCCAAACAAGGCACCCCATACGGGGGCA | |
| | | | GCTTCAGCACTACAACCTGGAACCTCAGGGTGCTT | |
| | | | TTCGACGAGCACCAAAAACACCACAATACGTGGAG | |
| | | | CTATCCAAGCAATCAACTAGACCTAGCCAGATTTA | |
| | | | GAGGCAGCATATTTTACTTTACAGAGACAAAAAAAC | |
| | | | TGACTACATAG | |
| AB060596.1 | BAB69914.1 | ORF3 | ATGAGCTGGTGTACTCCAGTTGAAAATGCCTATAA | 661 |
| | | | GAGAGAGATCCACTTTCTCAGGGGCTGTCAACTGC | |
| | | | TTCACACTAGCTTTTGTGGTTGCGATGATTTTATTA | |
| | | | ATCATATTATTCGCCTACAAAATCTTCACGGCAACC | |
| | | | TACACCAGCCCACGGGACCGTCCACACCTCCAGT | |
| | | | GACCCGTAGAGCTCTGGCCTTGCCGGCTGCTCCG | |
| | | | GAGTCATGGCGTTCCGGTGGTGGTGGTGGAGACG | |
| | | | CCGCCCGCAGCGACGATGGACCCGGCGCCGATG | |
| | | | GAGGAGACTACGAACCCGCCGACCTAGACGCACT | |
| | | | GTACGACGCCGTCGCCGCAGACCAAGAATTATCAA | |
| | | | AAACCCGTGTAAAAAAGAAGAATCCACATTCACCTA | |
| | | | TCCCAGTAGAGAGCCTCGCGACCTACAAGTTGTTG | |
| | | | ACCCACTCACCATGGGCCCAGAATGGGTCTTCCAC | |
| | | | ACATGGGACTGGAGACGTGGACTTTTTGGTAAAAA | |
| | | | TGCTGTCGACAGAGTGTCAAAAAAACCAGACGATG | |
| | | | ATGCAGAATATTATCCAGTACCAAAAAGGCCTCGA | |
| | | | TTCTTCCCTCCAACAGACACACAGTCAGAGCCAGA | |
| | | | AAAAGACTTCGGTTTCACACCGGAGAGCCAAGAGT | |
| | | | TACAGCAAGAAGACTTACGAGCACCCCAAGAAGAA | |
| | | | AGCCAAGAGGTACAGCAGCAGCGACTGCTCCAGC | |
| | | | TCAGACTCTCACAGCAGTTCAGACTCAGACAGCAG | |
| | | | CTCCAGCACCTGTTCGTACAAGTCCTCAAAACCCA | |
| | | | AGCAGGTCTCCACATAA | |
| AB060592.1 | BAB69898.1 | ORF3 | ATGAGCTTTGTAGAACCGTTACTAAGCAGCACCCA | 662 |
| | | | CCGAGAGATAGCATTCTACCATGGCTGTGTTCAAA | |
| | | | TGCACAAGGCCTTCTGTGGCTGTGACAACTTTCTT | |
| | | | ACCCACCTGCAGCGCATAACAACATACATCTCTGC | |
| | | | TAATCAACACACTCCACCCAGCACACCCTCAAACA | |
| | | | CCCTCCGTAGAGCCCGGGCCCTGCCCGCGGCTCC | |
| | | | GGAGCCAGCTCCATGGCGTGGACCTGGTGGTGGC | |
| | | | AGAGGAGGCGCCGAAGGTGGCCGTGGAGAAGGA | |
| | | | GAAGGTGGAGAAGACTACGCACCAGAAGACCTAG | |
| | | | ACGACTTGTTCGCCGCCGTCGCAAGAGATACAGA | |
| | | | GTTATCAGAAACCCTTGTAAAACAGAAGGACACGA | |
| | | | TCTCCCTCACACCAGTAGACTCCATCGCGACTTAC | |
| | | | AAGTTGTTGACCCACACACCGTGGGCCCCCAATG | |
| | | | GGCGCTCCACACCTGGGACTGGCGACGTGGACTC | |
| | | | TTTGGTTCAGAGGCTATCAAAAGAGTGTCTGAACA | |
| | | | ACAAGTACATGATGAACTGTATTACCCAGCTTCAAA | |
| | | | GAAACCTCGATTCCTCCCTCCAATATCAGGCCTCC | |
| | | | AAGAGCAAGAAAGAGACTACAGTTCGCAGGAGGA | |
| | | | AAAAGACCAGTCCTCCTCAGAAGAAGAGAAGGACC | |
| | | | CGAAGAAAAAAGAGCAAAAACAGCAGCAGCGACTC | |
| | | | CACCTCCAGTTCCAAGAGCAGCAGCGACTCGGAA | |
| | | | ACCAACTCCGACTCATCTTCCGAGAGCTACAGAAA | |
| | | | ACCCAAGCGGGTCTCCACATAA | |
| AB060593.1 | BAB69902.1 | ORF3 | ATGAGTCTGTGGCGACCCCCGGTCCACAATGCCC | 663 |
| | | | CCGGCAGAGAGAGACTTTGGTTTCAGGCCTGTTAC | |
| | | | GAATCTCACAGTGCTTTTTGTGGCTGTGGTAGCTTT | |
| | | | ATTCTTCATCTTACTAGCTTGGCTGCACGTTTTAAT | |
| | | | TTTCAGGCCGGGCCACCGCCTCCCGGGGGTCCCC | |
| | | | GGGCGGAGACCCCGCCGATTCTGAGGGCGCTGC | |
| | | | CGGCACCCCAGCCGCGCCGCCACCGCCAGACGG | |
| | | | AGAACCCCGGGTCTGAGCCATGGCCTGGAGATGG | |
| | | | TGGTGGAGACGGCGCTGGAAGCCAAGAAGGCGG | |
| | | | CCAGCGTGGACCAAGTACCGCAGACGCAGGTGGA | |
| | | | GACGACTTCGACCCCGCAGACCTAGAAGACTTGCT | |
| | | | CGCGGCCGTCGAAGAAGACGAACAGTCATCAAAG | |
| | | | ACCCGTGCAGCTCCTCAGGACTGGCACCTACCGA | |
| | | | CTCCAGTAGATTCAAGCGGGATGTACAAGTCGTTA | |
| | | | GCCCGCTCACAATGGGGCCCCGACTGCTATTCCA | |
| | | | CTCGTTCGACCAAAGACGAGGGTTCTTTACTCCAG | |
| | | | GAGCTATCAAACGAATGCATGATGAACAAATTAATG | |
| | | | TTCCAGACTTTACACAAAAACCTAAAATCCCGCGAA | |
| | | | TTTTCCCACCAGTCGAGCTCCGAGAAAGAGCAGAA | |
| | | | GCCGAAGAAGACTCAGGTTCGGAAAAAGCGTCGTT | |
| | | | CACCTCGTCGCAAGAGAGAGAAGCCGAAGCCCAA | |
| | | | GAAAAGTTACCGATACAGCTCCAGCTCAGACAGCA | |
| | | | GCTCAGACAACAACAGCAGCTCCGAGTCCACTTGC | |
| | | | AGCAAGTCTTCCTCCAACTCCAAAAAACGAAGGCA | |
| | | | CATTTACATATAA | |
| AB060595.1 | BAB69910.1 | ORF3 | ATGAATCTCTGGCGACCCCCTCTGAGAAATATCCC | 664 |
| | | | CCACAGGGAGAGATGTTGGCTTGAGGCCTGTCTC | |
| | | | AGAGCCCACGATTCTTTTTGTGGCTGTCCTAGTCC | |
| | | | TATTGTTCATTTTTCTAGTCTGGTTGCACGTTTTAAT | |
| | | | CTACAAGGAGGCCCGCCGCCAGAGGATGACTCCC | |
| | | | CACAGGGCGCGCCAGTCCTGAGGGCCCTGCCGG | |
| | | | CACCGAGCCCCCACAGGCACACCCGCACGGAGAA | |
| | | | CCCCTCCGGTGAGCCATGGCCTACTCCTACTGGTG | |
| | | | GCGCCGCCGGAGGTGGCCGTGGAGAGGCCGATG | |
| | | | GAGGCGCTGGAGGCGCCGCAGACGAATACCGCG | |
| | | | CCGAAGACCTAGACGACCTGTTCGCCGCTATCGAA | |
| | | | GGAGACCAACGATCAGAAACCCGTGCACCTCGGA | |
| | | | CGGACAGACGCCCACAACCAGTAGACAGTCTAGA | |
| | | | GAGGTACAAATCGTTGACCCGCTCACCATGGGACC | |
| | | | CCGATACGTATTCCACTCGTGGGACTGGCGACGTG | |
| | | | GGTGGCTTAATGACAGAACTCTCAAACGCTTGTTC | |
| | | | CAAAAACCGCTCGATTTTGAAGAGTATCCAAAATCT | |
| | | | CCAAAGAGACCTAGAATTTTCCCACCCACAGAGCA | |
| | | | GCTCCAAGAAGACCCGCAAGAGCAAGAAAGAGAC | |
| | | | TCCTCTTCTTCGGAAGAAAGTCTCCCTACATCGTCA | |
| | | | GAAGAGACACCGCCAGCCCACCTACTCAGAGTAC | |
| | | | ACCTCAGAAAGCAGCTCCGGCAACAGCGAGACCT | |
| | | | CCGAGTCCAGCTCAGAGCCCTGTTCGCCCAAGTC | |
| | | | CTCAAAACGCAAGCGGGCCTACACATAA | |
| AB064596.1 | BAB79312.1 | ORF3 | ATGCCGTGGAGACCGCCGGCTCATAACGTCCAGG | 665 |
| | | | GGCGAGAGAGCCAGTGGTTCGCGGCTTGTTTTCA | |
| | | | CGGCCACGCTTCGTTTTGCGGCTGCGGTGACTTTA | |
| | | | TTGGGCATATTAACAGCCTTGCTCCTCGCTTTCCTA | |
| | | | ACAACCAAGGACCCCCGCATCCACCTGCCTTAAAC | |
| | | | AGGCCACCTGCACAGGGCCCAGAAAGCCCCGGG | |
| | | | GGTTCCATACTACCCCTGCCAGCCCTACCGGCACC | |
| | | | ACCTGATCCGCCACCACGGCCTGGTGGTGGGGAA | |
| | | | GACGGTGGCGACGCCGCCCGTGGGGCCGCTGGC | |
| | | | GCCGCCGAAGGCGCGTATGGAGAAGAAGACCTAG | |
| | | | AACTGCTGTTCGCCGCCGCCGAGGAAGACGATAT | |
| | | | GCAATCGACGACCCCTGCCAGCAGGGAACCCACC | |
| | | | CGCTTCCCGAGCCCGGTACGTTGCCTAGAATCTTA | |
| | | | CAAGTCAGCGACCCGACGCAACTCGGACCGAAAA | |
| | | | CCATATTCCACCTCTGGGACCAGAGGCGTGGACTT | |
| | | | TTTAGCAAAAGAAGTATTGAAAGAATGTCAGAATAC | |
| | | | AAAGGAACTGATGACTTATTTTCACCAGGTCGCCC | |
| | | | AAAGCGCCCAAAGCTCGACACACGTCCCGAAGGA | |
| | | | CTACCAGAGGAGCAAAGAGGAGCTTACAATTTACT | |
| | | | CCAAGCCCTCGAAGACTCAGCCCAGTCGGAAGAA | |
| | | | AGCGACCAAGAAGAAATGCCTCCCCTCGAAGAAGA | |
| | | | ACAAGTACTCCACGAGCAAAAGAAAGAGGCGCTCC | |
| | | | TCCAGCAGCTCCAGCAGCAGAAACACCACCAGCG | |
| | | | AGTCCTCAAGCGAGGCCTCAGACTCCTCCTCGGA | |
| | | | GACGTCCTGA | |
| AB064597.1 | BAB79316.1 | ORF3 | ATGCCGTGGAGACCGCCGGTGCATAGTGTCCAGG | 666 |
| | | | GGCGAGAGGATCAGTGGTTCGCGAGCTTTTTTCAC | |
| | | | GGCCACGCTTCATTTTGCGGTTGCGGTGACGCTGT | |
| | | | TGGCCATCTTAATAGCATTGCTCCTCGCTTTCCTCG | |
| | | | CGCCGGTCCACCAAGGCCCCCTCCGGGGCTAGAG | |
| | | | CAGCCTAACCCCCCGCAGCAGGGCCCGGCCGGG | |
| | | | CCCGGAGGGCCGCCCGCCATCTTGGCGCTGCCG | |
| | | | GCTCCGCCCGCGGAGCCTGACGACCCGCAGCCAC | |
| | | | GGCGTGGTGGTGGGGACGGTGGCGCCGCCGCTG | |
| | | | GCGCCGCAGGCGACCGTGGAGACCGAGACTACGA | |
| | | | CGAAGAAGAGCTAGACGAGCTTTTCCGCGCCGCC | |
| | | | GCCGAAGACGATTTGGAACCCACCCGATTCCCGA | |
| | | | CCCCGATAAGCACCCTCGCCTCCTACAAGTGTCGA | |
| | | | ACCCGAAACTGCTCGGACCGAGGACAGTGTTCCA | |
| | | | CAAGTGGGACATCAGACGTGGGCAGTTTAGCAAAA | |
| | | | GAAGTATTAAAAGAGTGTCAGAATACTCATCGGAT | |
| | | | GATGAATCTCTTGCGCCAGGTCTCCCATCAAAGCG | |
| | | | AAACAAGCTCGACTCGGCCTTCAGAGGAGAAAACC | |
| | | | CAGAGCAAAAAGAATGCTATTCTCTCCTCAAAGCA | |
| | | | CTCGAGGAAGAAGAGACCCCAGAAGAAGAAGAAC | |
| | | | CAGCACCCCAAGAAAAAGCCCAGAAAGAGGAGCT | |
| | | | ACTCCACCAGCTCCAGCTCCAGAGACGCCACCAG | |
| | | | CGAGTCCTCAGACGAGGGCTCAAGCTCGTCTTTAC | |
| | | | AGACATCCTCCGACTCCGCCAGGGAGTCCACTGG | |
| | | | AACCCCGAGCTCACATAGAGCCCCCACCTTACATA | |
| | | | CCAGACCTACTTTTTCCCAATACTGGTAA | |
| AB064599.1 | BAB79324.1 | ORF3 | ATGCCGTGGTCTCTGCCGAGACATAATATCAGAAC | 667 |
| | | | GAGAGAAGATCTCTGGGTGCAATCGATTCTTTATTC | |
| | | | ACATGACACTTTTTGTGGCTGTGATAATATTCCTGA | |
| | | | GCATCTTACTGGCCTCCTGGGCGGCGTACGACCA | |
| | | | GCTCCACCTAGAAACCCAGGACCCCCTACCATACG | |
| | | | GAGCCTGCCGGCACTGCCGCCAGCTCCGGAACCC | |
| | | | CCTGAGGAACCACGGCGTGGTGGAGATACAGACG | |
| | | | GAGACCGTGGAGAAGATGGAGGAGACGCCGCTGG | |
| | | | GGCCTACGAACCCGAAGACCTAGAAGAACTTTTCG | |
| | | | CCGCCGCCGAGCAAGACGATATCCCATTGACGAC | |
| | | | CCCTGCCAAAAAGGAAAACACGACATTCCCGACCC | |
| | | | CGATACAAACCCTCCAAGAATACAAATATCAGACC | |
| | | | CGCAACACCTCGGACCGGCGACGCTGTTCCACTC | |
| | | | GTGGGACCTCAGACGTGGATATATTAATACAAAAA | |
| | | | GTATTAAAAGAATCTCAGAACACCTCGATGCTAATG | |
| | | | AATATTTTTCGACAGGCGTCGTGTCCAAAAAACCC | |
| | | | CGATTCGACACTCCCCACCACGGGCAGCTATCAAA | |
| | | | CCAAGAAGAAGACGCCTTGTCTATCCTCAGACAAC | |
| | | | CCCAAAAAGAGCAAGAAGAGACCACCTCCGAGGA | |
| | | | AGAACAAGCACTCCAAAAAGAAGAGGAGCAAAAAG | |
| | | | AAAAGCTCCTACAGCAACTCAGAGTCCAGCGACAG | |
| | | | CACCAGCGAGTCCTCAGACAGGGAATCAAACACCT | |
| | | | CATGGGAGACGTCCTCCGACTCAGACAGGGAGTC | |
| | | | CACTGGAACCCAGTCCTATAATACTTCCACCAGAA | |
| | | | CCAATACCAGACCTCTTATTCCCCAATACTGGTAA | |
| AB064600.1 | BAB79328.1 | ORF3 | ATGTCGTGGAGACCGCCGAGCCAAAATTTACTGCA | 668 |
| | | | AAGAGAAGAGGCCTGGTACTCAGCTTTTCTTAGCT | |
| | | | CGCATTCTACATTTTGCGGTTGTACTGACCCTCTGC | |
| | | | TGCATATTACTCTCATTGCTGGCCGCCTTACTAACC | |
| | | | CCGTACCCGTCACCCGCCAACCGGAGACCCCTCC | |
| | | | TAACGGCCTCAGGGGGCTGCCGGCACTGCCAGCA | |
| | | | CCCCCTGAACCACCAGCACCGCCACCACGGCCTG | |
| | | | GGGATGGTACCGGAGAAGAAGATGGCGCCCATGG | |
| | | | AGAAGGAGAAGGTGGGCGATACGCAGAAGAAGAC | |
| | | | CTAGAAGAACTGTTCGCCGCCGCGGCAGAAGACG | |
| | | | ATATCCTATCGACGACCCCTACCAAAAACCCACCC | |
| | | | ACGAAATACCCGACCCCGATAAGCACCCTCCAAGA | |
| | | | CTACAAATTGCAGACCCGAAAATCCTCGGACCGTC | |
| | | | GACAGTCTTCCACACATGGGACATCAGACGTGGCC | |
| | | | TCTTTAGCACAGCAAGTCTTAAGAGAGTGTCAGAA | |
| | | | TACCAACCGCCTGATGACCTTTTTTCAACAGGCGT | |
| | | | CGCATCCAAAAGACCCCGATTCGACACTCCAGTCC | |
| | | | AAGGGCAGCTCGAAAGCCAAGAAGAAGAAAGCTAT | |
| | | | CGTTTACTCAGAGCACTCCAAAAAGAGCAAGAGAC | |
| | | | AAGCAGCTCGGAAGAGGAGCAGCCACAAAACCAA | |
| | | | GAGATCCAAGAAAAACTACTCCTCCAGCTCCAGCA | |
| | | | GCAGCGACAACAGCAGCGACTCCTCGCAAAGGGA | |
| | | | ATCAAGCACCTCCTCGGAGATGTCCTCCGACTCCG | |
| | | | AAAAGGAGTCCACTGGGACCCGGTCCTTACATAGC | |
| | | | ACCTCCAGAACCTATCCCAGACCTTTTGTTCCCCA | |
| | | | GTACTAA | |
| AB064601.1 | BAB79332.1 | ORF3 | ATGTCGTGGGCTCCGCCGCTATTCAACTCGAAACA | 669 |
| | | | GAGAGAGGACCAGTGGTACCAGTCAATTATTTTCA | |
| | | | GCCATAATACTTTTTGCGGCTGCGGTGACCTTGTT | |
| | | | AGGCATTTTTGCGTCGTTGCTTCTCGCTTTACTGAG | |
| | | | CCTCCTGTAGTGCCGGCCCTACCGGCACCGGTAC | |
| | | | CGGCACCGCCACGGCGTGGTACAGAAGAAGAAGG | |
| | | | TGGAGACCGTGGAGAAGACGCCGCAGACCGTGGA | |
| | | | CCCTACGCAGAAGAAGAGCTAGAAGATTTGTTCGC | |
| | | | CGCCGCCCGAGAAGACGATATCCCATCGACGACC | |
| | | | CCTGCCAAAAAGACACCCACGAAATACCCGACCCC | |
| | | | GATAAACACCCTAGAGGAATACAAATATCAGACCC | |
| | | | GAAGGTACTCGGACCACCCACAGTCTTCCACACAT | |
| | | | GGGACATCAGACGTGGACTGTTTAGCTCGACGAGT | |
| | | | CTTAAAAGAGTGTCAGAATACCAACCGCCTGATGA | |
| | | | CCCTTTTTCAACAGGCGTCGTCTTCAAAAGACCCC | |
| | | | GACTGGAAACCCAGTACAAAGGAACCCAAGAAACC | |
| | | | CCAGAAGAAGACGCCTACACTTTACTCAAAGCACT | |
| | | | CCAAAAAGAGCAAGAGAGCAGCAGCTCGGAAGAA | |
| | | | GAACTCCCACAAGAAGAGCAAGAGATCCAAAAAAC | |
| | | | ACAACTCCTCAAGCAGCTCCAACTCCAGCAGCAGC | |
| | | | AACAGCGAATCCTCAAGAGGGGAATCAGACACCTC | |
| | | | TTCGGAGACGTCCTCCGACTCAGAAAAGGAGTCCA | |
| | | | CTCCAACCCAGACCTATTATAATACCAGCAGAGGA | |
| | | | AATCCCAGACCTGCTTTTCCCCAATACTGGTAA | |
| AB064602.1 | BAB79336.1 | ORF3 | ATGCCGTGGCATCCACCGGGCTACAACGTTCAACA | 670 |
| | | | GAGAGAAGAGCTCTGGGTACAGACAGTTACTACTT | |
| | | | CACATGCTACTTTTTGCGGCTGTGGTGACCCTAGT | |
| | | | AGCCATCTTCACCGCATTCTTAGCCGCCTTAATAAC | |
| | | | AGCAGCCGGCGGCCCCCCGAAACCCCAAACCCCA | |
| | | | TTCGTGCCCTACCGGCCCTACCGGCACCCCAAGA | |
| | | | ACCTGAACAGCCGCCATCACGGCCTGGTACCGGT | |
| | | | ACAGAAGAAGGCCATGGCGCCGAAGGAGGCGACC | |
| | | | GAGGTGGGGCCTACGCAGAAGAAGATTTAGAAGA | |
| | | | TCTTTTCGCGGCCGCGGAAGAAGACGATATCCCAT | |
| | | | CGACGACCCATGCCAAAAGCCCACCCACGACCTT | |
| | | | CCCGACCCCGATAGACACCCCCCAAGAATACAAAT | |
| | | | CTCGGACCCGGCAAGACTCGGACCGGAGACGCTC | |
| | | | TTCCACTCATGGGACATCAGACGTGGATACATTAA | |
| | | | CACAAAAGCTATTAAAAGAATCTCAGATTACACAGA | |
| | | | ATCTAATGACTATTTTTCAACAGGCGTCGTGTCAAA | |
| | | | AAGACCCCGATTGGAAACCCAGTACCACGGCCAA | |
| | | | CACGAAAGCCAAGAAGAAGACGCCTATCTTTTACT | |
| | | | CAAACAACTCCAGGAAGAGCAAGAAACGAGCAGTT | |
| | | | CGGAGGGAGAACAAGCACCCCAAGAAAAAACACT | |
| | | | CCAAAAAGAAAAGCTCCTCAAGCAGCTGCAGCTCC | |
| | | | ACAAGCAGCAGCAGCAACTCCTCAGAAAAGGAATC | |
| | | | AGACACCTCCTCGGGGACGTCCTCCGACTCAGAC | |
| | | | GGGGAGTCCACTGGGACCCAGGCCTATAGTACTG | |
| | | | CCTCCAGAGCCTATTCCAGACTTGCTTTTCCCAAAT | |
| | | | ACTAA | |
| AB064603.1 | BAB79340.1 | ORF3 | ATGTCGTGGCGACCGCCGTTGCATTCTATCCAAGG | 671 |
| | | | CAGAGAAGATCAATGGTATGCAGGCATCTTTCATA | |
| | | | CGCATTTTGCTTTTTGCGGTTGTGGTGACCCTGTT | |
| | | | GGGCGTATTAACCGCATTGCTCACCGCTTTCCTAA | |
| | | | CGCCGGTCCCCCGAGACCACCTCCAGGGCTAGAC | |
| | | | CAGCCCAACCTCGGAGGGCCGGAAGGTCCAGGAG | |
| | | | GTGCCCCTAGAGCCCTGCCAGCCCTGCCGGCCCC | |
| | | | GGCAGAGCCAGAGCCGGCACCACGGCGTGGTGG | |
| | | | TGGGGCCGATGGAGACAGCGCCGCTGGGGCCGC | |
| | | | CGCCGCCGCAGACCATGGAGGGTACGACGAAGGA | |
| | | | GACCTAGAAGATCTTTTCGCCGCCGCCGCCGAGG | |
| | | | ACGATATGCAATCGACGACCCCTGCCAGAAGCCCA | |
| | | | CCCATGAGCTACCCGATCCCGATAGACACCCTCGC | |
| | | | ATGTTACAAGTCTCTGACCCGACAAAGCTCGGACC | |
| | | | GAAGACAGTGTTCCACAAATGGGACTGGAGACGT | |
| | | | GGGCAACTTAGCAAAAGAAGTATTAAAAGAGTCCA | |
| | | | AGAAGACTCAACGGATGATGAATATGTTACAGGGC | |
| | | | CTTTATCAAGAAAAAGAAACAAGCTCGACACAAAG | |
| | | | ATGCCAGGCCCCCCAACCCCCGAAAAAGAAAGCT | |
| | | | ACACTTTACTCCAAGCCCTCCAAGAGTCGGGCCAG | |
| | | | GAGAGCAGCTCCCAGGACGAAGAACAAGCACCCC | |
| | | | AAAAAGAAGAGAACCAGAAAGAAGCGCTCGTGGA | |
| | | | GCAGCTCCAGCTCCAGAAACAGCACCAGCGAGTC | |
| | | | CTCAAGCGAGGCCTCAAACTCCTCTTGGGAGACGT | |
| | | | CCTCCGACTCCGCCGCGGAGTCCACTGGGACCCC | |
| | | | CTCCTATCCTAATTCAGGGTCCCTCTATCCCAGAC | |
| | | | CTGCTTTTCCCTAA | |
| AB064604.1 | BAB79344.1 | ORF3 | ATGAGTATTTGGAGGCCTCCACTGCACAATGTCCC | 672 |
| | | | GGGACTCGAACACCTCTGGTACGAGTCAGTGCATC | |
| | | | GTAGCCATGCTGCTGTTTGTGGCTGTGGGGATCCT | |
| | | | GTACGCCATCTTACTGCTCTTGCTGAAAGATATGG | |
| | | | CATTCCGGGAGGGTCGCGGTCTTCTGGGGCACCG | |
| | | | GGAGTAGGGGGCAACCACAACCCTCCCCAGATCC | |
| | | | GTCGAGCCCGCCACCCGGCGGCTGCTCCGGACCC | |
| | | | CCCAGCAGGTAACCAGCCTCCGGCCCTGCCATGG | |
| | | | CATGGGGATGGTGGAAACGAAAGCGGCGCTGGTG | |
| | | | GTGGAGAAAGCGGTGGACCCGTGGCCGACTTCGC | |
| | | | AGACGATGGCCTAGACGATCTCGTCGCCGCCCTC | |
| | | | GACGAAGAAGAATTGTTAAAGACCCCTGCACCCAG | |
| | | | CCCACCTTTGAAATACCCGGTGGCGGTAACATCCC | |
| | | | TCGCAGAATACAAGTCATCAATCCGAAAGTCCTCG | |
| | | | GACCCAGCTACAGTTTCAGATCCTTTGACCTCAGA | |
| | | | CGTGACATGTTTAGCGGCTCGAGTCTTAAAAGAGT | |
| | | | CTCAGAACAACAAGAGACTTCTGAGTTTTTATTCTC | |
| | | | CGGCGGCAAACGCCCCAGGATCGACCTTCCCAAG | |
| | | | TACGTCCCGCCAGAAGAAGACTTCAATATCCAAGA | |
| | | | GAGACAACAAAGAGAACAGAGACCGTGGACGAGC | |
| | | | GAAAGCGAGAGCGAAGCAGAAGCCCAAGAAGAGA | |
| | | | CGCAGGCGGGCTCGGTCCGAGAGCAGCTCCAGCA | |
| | | | GCAGCTCCAAGAGCAGTTTCAACTCCGAAGAGGG | |
| | | | CTCAAGTGCCTCTTCGAGCAGTTAG | |
| AB064606.1 | BAB79352.1 | ORF3 | ATGAGCTTCTGGAGACCTCCGGTGCACAATGCCAC | 673 |
| | | | GGGGATCCAGCGCCTGTGGTACGAGTCCTTTCAC | |
| | | | CGTGGCCATGCTGCTTTTTGTGGTTGTGGGGATCC | |
| | | | TATACTTCACATTACTGCACTTGCTGAGACATATGG | |
| | | | CCATCCAACAGGCCCGAGACCTTCTGGGCCACCG | |
| | | | CGAGTAGACCCCGATCCCCAGATCCGTAGAGCCA | |
| | | | GGCCTGCCCCGGCCGCTCCGGAGCCCTCACAGGT | |
| | | | TGAGCCGAGACCTGCCCTGCCATGGCATGGGGAT | |
| | | | GGTGGAAGCGACGGCGGCGCTGGTGGTTCCGGA | |
| | | | AGCGGTGGACCCGTGGCAGACTTCGCAGACGATG | |
| | | | GCCTCGATCAGCTCGTCGCCGCCCTAGACGACGA | |
| | | | AGAATTGTACAAGATCCCTGCACACAGTCCACCTA | |
| | | | TGACATCCCCGGCACCGGTAACTTGCCTCGCAGAA | |
| | | | TACAAGTCATTGACCCGAAAGTCCTCGGTCCCCAC | |
| | | | TACTCATTCCACCGCTGGGACTTCAGGCGTGGCCT | |
| | | | CTTTGGCCAACAAGCTATTAAGAGAGTGTCAGAAC | |
| | | | AACCAACAACTTCTGAGTTTTTATTCTCAGGTCCAA | |
| | | | AGAGACCCAGAATCGATCAAGGGCCTTACATCCCG | |
| | | | CCAGAAAAAGGCTCAGATTCACTCCAAAGAGAATC | |
| | | | GAGACCGTGGAGCAACTCGGAGACCGAGGCAGAG | |
| | | | ACAGAAGCCCCCTCGGAAGAAGAGCCGGAGAACC | |
| | | | AAGAAGAACAAGTACTCCAGTTGCAGCTCCGACAG | |
| | | | CAGCTCCGAGAACAGCGAAAACTCAGACAGGGAA | |
| | | | TCCAGTGCCTCTTCGAGCAACTGA | |
| FJ426280.1 | ACK44073.1 | ORF3 | ATGCTATCCAGAGAGTGTCACAAAAACCGGAAGAT | 674 |
| | | | GCTCTCCGCTTTACAAACCCTTTCAAGAGACCCAG | |
| | | | ATATCTTCCCCCGACAGACGGAGAAGACTACCGAC | |
| | | | AAGAAGAAGACTTCGCTTTACAGGAAAGAAGACGG | |
| | | | CGCACATCCACAGAAGAAGTCCAGGACGAGGAGA | |
| | | | GCCCCCCGCAAAACGCGCCGCTCCTACAGCAGCA | |
| | | | GCAGCAGCAGCGGGAGCTCTCAGTCCAGCACGCG | |
| | | | GAGCAGCAGCGACTCGGAGTCCAACTCCGATACA | |
| | | | TCCTCCAAGAAGTCCTCAAAACGCAAGCGGGTCTC | |
| | | | CACCTAA | |
| AB050448.1 | BAB19925.1 | ORF4 | ATGAGCTTTGTAGAACCCTTACTAACCAGCACCCA | 675 |
| | | | CAGAGAGATAGCATACTACCATGGCTGTGTTCAGA | |
| | | | TGCACAAAGCCTTCTGTGGGTGTGACAACTTTCTTA | |
| | | | CCCACCTGCAACGCATAACAACATACATCTCTGCT | |
| | | | AACCAACACACTCCACCCAGCACACCCTCAAACAC | |
| | | | CCTCCGTAGAGCCCGGGCCCTGCCCGCGGCTCCG | |
| | | | GAGCCAGCTCCATGGCGTGGACCTGGTGGTGGCA | |
| | | | GAGGAGGCGCCGAAGGTGGCCGTGGAGAAGGAG | |
| | | | AAGGTGGAGAAGACTACGCACAAGAAGACCTAGA | |
| | | | CGCCTTGTTCGACGCCGTCGCAAGAGATACAGAG | |
| | | | CCTCCAAGAGCAAGAAAGAGACTACAGTTCGCAGG | |
| | | | AGGAGAAAGAACAGTCCTCCTCAGAAGAAGAGAC | |
| | | | GGACCCGAAGAAAAAAGAGCAAAAACAGCAGCAG | |
| | | | CGACTCCACCTCCAGTTCCAAGAGCAGCAGCGACT | |
| | | | CGGAAACCAACTCCGACTCATCTTCCGAGAGCTAC | |
| | | | AGAAAACCCAAGCGGGTCTCCACTTAAATCCTATG | |
| | | | TTATCAAACCGGCTGTAAATAAAGTTTACCTTTTTC | |
| | | | CTCCCGAGGGGCCTAAACCCATCTCTGGCTACAGA | |
| | | | GCATGGGAAGACGAATTTACCACCTGTAAGTACTG | |
| | | | GGACAGGCCTAGTAGAATTAACCACACAGACCCCC | |
| | | | CCTTTTACCCCTGGATGCCTAAATACAATGTAACCT | |
| | | | TCAAACTTGGCTGGAAATAA | |
| AB060596.1 | BAB69913.1 | ORF4 | ATGAGCTGGTGTACTCCAGTTGAAAATGCCTATAA | 676 |
| | | | GAGAGAGATCCACTTTCTCAGGGGCTGTCAACTGC | |
| | | | TTCACACTAGCTTTTGTGGTTGCGATGATTTTATTA | |
| | | | ATCATATTATTCGCCTACAAAATCTTCACGGCAACC | |
| | | | TACACCAGCCCACGGGACCGTCCACACCTCCAGT | |
| | | | GACCCGTAGAGCTCTGGCCTTGCCGGCTGCTCCG | |
| | | | GAGTCATGGCGTTCCGGTGGTGGTGGTGGAGACG | |
| | | | CCGCCCGCAGCGACGATGGACCCGGCGCCGATG | |
| | | | GAGGAGACTACGAACCCGCCGACCTAGACGCACT | |
| | | | GTACGACGCCGTCGCCGCAGACCAAGAACACACA | |
| | | | GTCAGAGCCAGAAAAAGACTTCGGTTTCACACCGG | |
| | | | AGAGCCAAGAGTTACAGCAAGAAGACTTACGAGCA | |
| | | | CCCCAAGAAGAAAGCCAAGAGGTACAGCAGCAGC | |
| | | | GACTGCTCCAGCTCAGACTCTCACAGCAGTTCAGA | |
| | | | CTCAGACAGCAGCTCCAGCACCTGTTCGTACAAGT | |
| | | | CCTCAAAACCCAAGCAGGTCTCCACATAAACCCAT | |
| | | | TATTTTTAAACCATGCATAAATCAGGTCTTTATGTTT | |
| | | | CCACCAGACACCCCCAGACCTATTATAACTAAAGA | |
| | | | AGGCTGGGAGGATGAGTTTGTCACCTGCAAACACT | |
| | | | GGGATAGGCCAGCTAGATCATACTACACAGACACA | |
| | | | CCTACTTACCCTTGGATGCCCAAGGCACCCCCTCA | |
| | | | ATGCAATGTAAGCTTTAAACTTGGCTTTAAATAA | |
| AB060592.1 | BAB69897.1 | ORF4 | ATGAGCTTTGTAGAACCGTTACTAAGCAGCACCCA | 677 |
| | | | CCGAGAGATAGCATTCTACCATGGCTGTGTTCAAA | |
| | | | TGCACAAGGCCTTCTGTGGCTGTGACAACTTTCTT | |
| | | | ACCCACCTGCAGCGCATAACAACATACATCTCTGC | |
| | | | TAATCAACACACTCCACCCAGCACACCCTCAAACA | |
| | | | CCCTCCGTAGAGCCCGGGCCCTGCCCGCGGCTCC | |
| | | | GGAGCCAGCTCCATGGCGTGGACCTGGTGGTGGC | |
| | | | AGAGGAGGCGCCGAAGGTGGCCGTGGAGAAGGA | |
| | | | GAAGGTGGAGAAGACTACGCACCAGAAGACCTAG | |
| | | | ACGACTTGTTCGCCGCCGTCGCAAGAGATACAGA | |
| | | | GCCTCCAAGAGCAAGAAAGAGACTACAGTTCGCAG | |
| | | | GAGGAAAAAGACCAGTCCTCCTCAGAAGAAGAGAA | |
| | | | GGACCCGAAGAAAAAAGAGCAAAAACAGCAGCAG | |
| | | | CGACTCCACCTCCAGTTCCAAGAGCAGCAGCGACT | |
| | | | CGGAAACCAACTCCGACTCATCTTCCGAGAGCTAC | |
| | | | AGAAAACCCAAGCGGGTCTCCACATAAATCCTATG | |
| | | | TTATCAAACCGGCTATAAATAAAGTTTACCTTTTTCC | |
| | | | TCCCGAGGGGCCTAAACCCATCTCTGGCTACAGA | |
| | | | GCATGGGAAGATGAGTTCACCTGCTGTAAGTACTG | |
| | | | GGACAGGCCTAGTAGAATTAACCACACAGACCCCC | |
| | | | ACCCCTGGATGCCTAAGTACAATGTAACCT | |
| | | | CCTTCTTTAAACTTGGCTGGAAATAA | |
| AB060593.1 | BAB69901.1 | ORF4 | ATGAGTCTGTGGCGACCCCCGGTCCACAATGCCC | 678 |
| | | | CCGGCAGAGAGAGACTTTGGTTTCAGGCCTGTTAC | |
| | | | GAATCTCACAGTGCTTTTTGTGGCTGTGGTAGCTTT | |
| | | | ATTCTTCATCTTACTAGCTTGGCTGCACGTTTTAAT | |
| | | | TTTCAGGCCGGGCCACCGCCTCCCGGGGGTCCCC | |
| | | | GGGCGGAGACCCCGCCGATTCTGAGGGCGCTGC | |
| | | | CGGCACCCCAGCCGCGCCGCCACCGCCAGACGG | |
| | | | AGAACCCCGGGTCTGAGCCATGGCCTGGAGATGG | |
| | | | TGGTGGAGACGGCGCTGGAAGCCAAGAAGGCGG | |
| | | | CCAGCGTGGACCAAGTACCGCAGACGCAGGTGGA | |
| | | | GACGACTTCGACCCCGCAGACCTAGAAGACTTGCT | |
| | | | CGCGGCCGTCGAAGAAGACGAACATCGAGCTCCG | |
| | | | AGAAAGAGCAGAAGCCGAAGAAGACTCAGGTTCG | |
| | | | GAAAAAGCGTCGTTCACCTCGTCGCAAGAGAGAGA | |
| | | | AGCCGAAGCCCAAGAAAAGTTACCGATACAGCTCC | |
| | | | AGCTCAGACAGCAGCTCAGACAACAACAGCAGCTC | |
| | | | CGAGTCCACTTGCAGCAAGTCTTCCTCCAACTCCA | |
| | | | AAAAACGAAGGCACATTTACATATAAACCCACTATT | |
| | | | TTTGGCCCAAGGGAACATGTAAACATGTTCGGTGA | |
| | | | GTACCCAGATAGGAAGCCCACTAAGGAAGATTGGC | |
| | | | AGACCGAGTATGAGACCTGCAGAGCCTTTGATAGA | |
| | | | CCCCCTAGAACCTTACTCACAGATCCCCCTTTCTAC | |
| | | | CCCTGGATGCCTAAACAACCCCCCACCTATCGTGT | |
| | | | ATCCTTCAAACTTGGCTTTCAATAA | |
| AB060595.1 | BAB69909.1 | ORF4 | ATGAATCTCTGGCGACCCCCTCTGAGAAATATCCC | 679 |
| | | | CCACAGGGAGAGATGTTGGCTTGAGGCCTGTCTC | |
| | | | AGAGCCCACGATTCTTTTTGTGGCTGTCCTAGTCC | |
| | | | TATTGTTCATTTTTCTAGTCTGGTTGCACGTTTTAAT | |
| | | | CTACAAGGAGGCCCGCCGCCAGAGGATGACTCCC | |
| | | | CACAGGGCGCGCCAGTCCTGAGGGCCCTGCCGG | |
| | | | CACCGAGCCCCCACAGGCACACCCGCACGGAGAA | |
| | | | CCCCTCCGGTGAGCCATGGCCTACTCCTACTGGTG | |
| | | | GCGCCGCCGGAGGTGGCCGTGGAGAGGCCGATG | |
| | | | GAGGCGCTGGAGGCGCCGCAGACGAATACCGCG | |
| | | | CCGAAGACCTAGACGACCTGTTCGCCGCTATCGAA | |
| | | | GGAGACCAAGCAGCTCCAAGAAGACCCGCAAGAG | |
| | | | CAAGAAAGAGACTCCTCTTCTTCGGAAGAAAGTCT | |
| | | | CCCTACATCGTCAGAAGAGACACCGCCAGCCCAC | |
| | | | CTACTCAGAGTACACCTCAGAAAGCAGCTCCGGCA | |
| | | | ACAGCGAGACCTCCGAGTCCAGCTCAGAGCCCTG | |
| | | | TTCGCCCAAGTCCTCAAAACGCAAGCGGGCCTACA | |
| | | | CATAAACCCCCTCTTATTGGCCCCGCAGTAAACAA | |
| | | | GGTCTACTTGTTCCCTGACAGGGCCCCTAAACCTC | |
| | | | CACCTAGCTCGGGAGACTGGGCCACGGAGTACGC | |
| | | | GGCGGCCGCCGCCTTCGATAGACCCCCCAGAGGC | |
| | | | AACCTGTCAGACAACCCCTTCTATCCCTGGATGCC | |
| | | | AACAAACACCAAATTCTCTGTAACCTTTAAACTGGG | |
| | | | GTGGAAACCCTGA | |
| AB064596.1 | BAB79311.1 | ORF4 | ATGCCGTGGAGACCGCCGGCTCATAACGTCCAGG | 680 |
| | | | GGCGAGAGAGCCAGTGGTTCGCGGCTTGTTTTCA | |
| | | | CGGCCACGCTTCGTTTTGCGGCTGCGGTGACTTTA | |
| | | | TTGGGCATATTAACAGCCTTGCTCCTCGCTTTCCTA | |
| | | | ACAACCAAGGACCCCCGCATCCACCTGCCTTAAAC | |
| | | | AGGCCACCTGCACAGGGCCCAGAAAGCCCCGGG | |
| | | | GGTTCCATACTACCCCTGCCAGCCCTACCGGCACC | |
| | | | ACCTGATCCGCCACCACGGCCTGGTGGTGGGGAA | |
| | | | GACGGTGGCGACGCCGCCCGTGGGGCCGCTGGC | |
| | | | GCCGCCGAAGGCGCGTATGGAGAAGAAGACCTAG | |
| | | | AACTGCTGTTCGCCGCCGCCGAGGAAGACGATAT | |
| | | | GTCGCCCAAAGCGCCCAAAGCTCGACACACGTCC | |
| | | | CGAAGGACTACCAGAGGAGCAAAGAGGAGCTTAC | |
| | | | AATTTACTCCAAGCCCTCGAAGACTCAGCCCAGTC | |
| | | | GGAAGAAAGCGACCAAGAAGAAATGCCTCCCCTC | |
| | | | GAAGAAGAACAAGTACTCCACGAGCAAAAGAAAGA | |
| | | | GGCGCTCCTCCAGCAGCTCCAGCAGCAGAAACAC | |
| | | | CACCAGCGAGTCCTCAAGCGAGGCCTCAGACTCC | |
| | | | TCCTCGGAGACGTCCTGAAACTCCGCCGGGGTCT | |
| | | | ACACATAGACCCGGTCCTTACATAGCACCCCCTCC | |
| | | | ATACATCCCTGACCTTCTTTTTCCCAACACCCAAAA | |
| | | | AAAAAAAAAATTTTCCAACTTCGATTGGGCTACAGA | |
| | | | ATACCAGCTTGCTACCGCTTTCGACCGCCCTCTCC | |
| | | | GCCACTACCCCTTAGACCTCCCGCACTACCCGTGG | |
| | | | CTACCAAAAAAGCCCAATACCCACTCTACCTATAGA | |
| | | | GTGTCCTTTCAACTAAAAGCCCCCCAATAA | |
| AB064597.1 | BAB79315.1 | ORF4 | ATGCCGTGGAGACCGCCGGTGCATAGTGTCCAGG | 681 |
| | | | GGCGAGAGGATCAGTGGTTCGCGAGCTTTTTTCAC | |
| | | | GGCCACGCTTCATTTTGCGGTTGCGGTGACGCTGT | |
| | | | TGGCCATCTTAATAGCATTGCTCCTCGCTTTCCTCG | |
| | | | CGCCGGTCCACCAAGGCCCCCTCCGGGGCTAGAG | |
| | | | CAGCCTAACCCCCCGCAGCAGGGCCCGGCCGGG | |
| | | | CCCGGAGGGCCGCCCGCCATCTTGGCGCTGCCG | |
| | | | GCTCCGCCCGCGGAGCCTGACGACCCGCAGCCAC | |
| | | | GGCGTGGTGGTGGGGACGGTGGCGCCGCCGCTG | |
| | | | GCGCCGCAGGCGACCGTGGAGACCGAGACTACGA | |
| | | | CGAAGAAGAGCTAGACGAGCTTTTCCGCGCCGCC | |
| | | | GCCGAAGACGATTTGTCTCCCATCAAAGCGAAACA | |
| | | | AGCTCGACTCGGCCTTCAGAGGAGAAAACCCAGA | |
| | | | GCAAAAAGAATGCTATTCTCTCCTCAAAGCACTCG | |
| | | | AGGAAGAAGAGACCCCAGAAGAAGAAGAACCAGC | |
| | | | ACCCCAAGAAAAAGCCCAGAAAGAGGAGCTACTCC | |
| | | | ACCAGCTCCAGCTCCAGAGACGCCACCAGCGAGT | |
| | | | CCTCAGACGAGGGCTCAAGCTCGTCTTTACAGACA | |
| | | | TCCTCCGACTCCGCCAGGGAGTCCACTGGAACCC | |
| | | | CGAGCTCACATAGAGCCCCCACCTTACATACCAGA | |
| | | | CCTACTTTTTCCCAATACTGGTAAAAAAAAAAAATT | |
| | | | CTCTCCCTTCGACTGGGAAACGGAGGCCCAGCTA | |
| | | | GCAGGGATATTCAAGCGTCCTATGCGCTTCTATCC | |
| | | | CTCAGACACCCCTCACTACCCGTGGTTACCCCCCA | |
| | | | AGCGCGATATCCCGAAAATATGTAACATAAACTTCA | |
| | | | AAATAAAGCTGCAAGAGTGA | |
| AB064599.1 | BAB79323.1 | ORF4 | ATGCCGTGGTCTCTGCCGAGACATAATATCAGAAC | 682 |
| | | | GAGAGAAGATCTCTGGGTGCAATCGATTCTTTATTC | |
| | | | ACATGACACTTTTTGTGGCTGTGATAATATTCCTGA | |
| | | | GCATCTTACTGGCCTCCTGGGCGGCGTACGACCA | |
| | | | GCTCCACCTAGAAACCCAGGACCCCCTACCATACG | |
| | | | GAGCCTGCCGGCACTGCCGCCAGCTCCGGAACCC | |
| | | | CCTGAGGAACCACGGCGTGGTGGAGATACAGACG | |
| | | | GAGACCGTGGAGAAGATGGAGGAGACGCCGCTGG | |
| | | | GGCCTACGAACCCGAAGACCTAGAAGAACTTTTCG | |
| | | | CCGCCGCCGAGCAAGACGATATGCGTCGTGTCCA | |
| | | | AAAAACCCCGATTCGACACTCCCCACCACGGGCA | |
| | | | GCTATCAAACCAAGAAGAAGACGCCTTGTCTATCC | |
| | | | TCAGACAACCCCAAAAAGAGCAAGAAGAGACCACC | |
| | | | TCCGAGGAAGAACAAGCACTCCAAAAAGAAGAGGA | |
| | | | GCAAAAAGAAAAGCTCCTACAGCAACTCAGAGTCC | |
| | | | AGCGACAGCACCAGCGAGTCCTCAGACAGGGAAT | |
| | | | CAAACACCTCATGGGAGACGTCCTCCGACTCAGAC | |
| | | | AGGGAGTCCACTGGAACCCAGTCCTATAATACTTC | |
| | | | CACCAGAACCAATACCAGACCTCTTATTCCCCAATA | |
| | | | CTGGTAAAAAAAAAAAATTCTCTCTCTTCGACTGGG | |
| | | | AGTGCGAGAGGGATCTAGCATGTGCATTCTGCCGT | |
| | | | CCCATGCGCTTCTATCCCTCAGACAACCCAACTTA | |
| | | | CCCGTGGTTACCCCCCAAGCGAGATATCCCCAAAA | |
| | | | TATGTAAAGTAAACTTCAAAATAAATTTCACTGAAT | |
| | | | GA | |
| AB064600.1 | BAB79327.1 | ORF4 | ATGTCGTGGAGACCGCCGAGCCAAAATTTACTGCA | 683 |
| | | | AAGAGAAGAGGCCTGGTACTCAGCTTTTCTTAGCT | |
| | | | CGCATTCTACATTTTGCGGTTGTACTGACCCTCTGC | |
| | | | TGCATATTACTCTCATTGCTGGCCGCCTTACTAACC | |
| | | | CCGTACCCGTCACCCGCCAACCGGAGACCCCTCC | |
| | | | TAACGGCCTCAGGGGGCTGCCGGCACTGCCAGCA | |
| | | | CCCCCTGAACCACCAGCACCGCCACCACGGCCTG | |
| | | | GGGATGGTACCGGAGAAGAAGATGGCGCCCATGG | |
| | | | AGAAGGAGAAGGTGGGCGATACGCAGAAGAAGAC | |
| | | | CTAGAAGAACTGTTCGCCGCCGCGGCAGAAGACG | |
| | | | ATATGCGTCGCATCCAAAAGACCCCGATTCGACAC | |
| | | | TCCAGTCCAAGGGCAGCTCGAAAGCCAAGAAGAA | |
| | | | GAAAGCTATCGTTTACTCAGAGCACTCCAAAAAGA | |
| | | | GCAAGAGACAAGCAGCTCGGAAGAGGAGCAGCCA | |
| | | | CAAAACCAAGAGATCCAAGAAAAACTACTCCTCCA | |
| | | | GCTCCAGCAGCAGCGACAACAGCAGCGACTCCTC | |
| | | | GCAAAGGGAATCAAGCACCTCCTCGGAGATGTCCT | |
| | | | CCGACTCCGAAAAGGAGTCCACTGGGACCCGGTC | |
| | | | CTTACATAGCACCTCCAGAACCTATCCCAGACCTTT | |
| | | | TGTTCCCCAGTACTAAAAAAAAAAAGAAATTTTCAA | |
| | | | AATTAGACTGGGAGAACGAGGCTCAAATAGCAGG | |
| | | | GTGGTTAGACAGGCCTATGAGGCTGTATCCTGGG | |
| | | | GACCCCCCCTTCTACCCTTGGCTACCCCGAAAGCC | |
| | | | ACCTACCCAGCCTACATGTAGGGTAAGCTTCAAAA | |
| | | | TAAAGCTAGATGATTAA | |
| AB064601.1 | BAB79331.1 | ORF4 | ATGTCGTGGGCTCCGCCGCTATTCAACTCGAAACA | 684 |
| | | | GAGAGAGGACCAGTGGTACCAGTCAATTATTTTCA | |
| | | | GCCATAATACTTTTTGCGGCTGCGGTGACCTTGTT | |
| | | | AGGCATTTTTGCGTCGTTGCTTCTCGCTTTACTGAG | |
| | | | CCTCCTGTAGTGCCGGCCCTACCGGCACCGGTAC | |
| | | | CGGCACCGCCACGGCGTGGTACAGAAGAAGAAGG | |
| | | | TGGAGACCGTGGAGAAGACGCCGCAGACCGTGGA | |
| | | | CCCTACGCAGAAGAAGAGCTAGAAGATTTGTTCGC | |
| | | | CGCCGCCCGAGAAGACGATATGCGTCGTCTTCAAA | |
| | | | AGACCCCGACTGGAAACCCAGTACAAAGGAACCC | |
| | | | AAGAAACCCCAGAAGAAGACGCCTACACTTTACTC | |
| | | | AAAGCACTCCAAAAAGAGCAAGAGAGCAGCAGCTC | |
| | | | GGAAGAAGAACTCCCACAAGAAGAGCAAGAGATC | |
| | | | CAAAAAACACAACTCCTCAAGCAGCTCCAACTCCA | |
| | | | GCAGCAGCAACAGCGAATCCTCAAGAGGGGAATC | |
| | | | AGACACCTCTTCGGAGACGTCCTCCGACTCAGAAA | |
| | | | AGGAGTCCACTCCAACCCAGACCTATTATAATACC | |
| | | | AGCAGAGGAAATCCCAGACCTGCTTTTCCCCAATA | |
| | | | CTGGTAAAAAAAAAAAATTCTCTCCATTCGATTGGG | |
| | | | AGACAGAGCAGCAGCTCGCATGCTGGATGCGGCG | |
| | | | CCCCATGCGCTTCTATCCAACAGACCCCCCGTTCT | |
| | | | ACCCCTGGCTACCCCCCAAGCGAGATATCCCCAAT | |
| | | | ATATGTAAAGTCAACTTCAAAATAAATTACTCAGAG | |
| | | | TAA | |
| AB064602.1 | BAB79335.1 | ORF4 | ATGCCGTGGCATCCACCGGGCTACAACGTTCAACA | 685 |
| | | | GAGAGAAGAGCTCTGGGTACAGACAGTTACTACTT | |
| | | | CACATGCTACTTTTTGCGGCTGTGGTGACCCTAGT | |
| | | | AGCCATCTTCACCGCATTCTTAGCCGCCTTAATAAC | |
| | | | AGCAGCCGGCGGCCCCCCGAAACCCCAAACCCCA | |
| | | | TTCGTGCCCTACCGGCCCTACCGGCACCCCAAGA | |
| | | | ACCTGAACAGCCGCCATCACGGCCTGGTACCGGT | |
| | | | ACAGAAGAAGGCCATGGCGCCGAAGGAGGCGACC | |
| | | | GAGGTGGGGCCTACGCAGAAGAAGATTTAGAAGA | |
| | | | TCTTTTCGCGGCCGCGGAAGAAGACGATATGCGTC | |
| | | | GTGTCAAAAAGACCCCGATTGGAAACCCAGTACCA | |
| | | | CGGCCAACACGAAAGCCAAGAAGAAGACGCCTAT | |
| | | | CTTTTACTCAAACAACTCCAGGAAGAGCAAGAAAC | |
| | | | GAGCAGTTCGGAGGGAGAACAAGCACCCCAAGAA | |
| | | | AAAACACTCCAAAAAGAAAAGCTCCTCAAGCAGCT | |
| | | | GCAGCTCCACAAGCAGCAGCAGCAACTCCTCAGA | |
| | | | AAAGGAATCAGACACCTCCTCGGGGACGTCCTCC | |
| | | | GACTCAGACGGGGAGTCCACTGGGACCCAGGCCT | |
| | | | ATAGTACTGCCTCCAGAGCCTATTCCAGACTTGCTT | |
| | | | TTCCCAAATACTAAAAAAAAAAAGAAATTTTCGCCC | |
| | | | TTAGACTGGGAGAACGAGGCTCAAATAGCAGGGT | |
| | | | GGTTAGACAGGCCTATGAGGCTGTATCCTGGGGA | |
| | | | CAACCCCTTCTACCCGTGGCTACCAAAAAAGCCAC | |
| | | | CTACCCACCCTACATGTAGAGTAACCTTCAAAATAA | |
| | | | AGCTAGATGATTAA | |
| AB064603.1 | BAB79339.1 | ORF4 | ATGTCGTGGCGACCGCCGTTGCATTCTATCCAAGG | 686 |
| | | | CAGAGAAGATCAATGGTATGCAGGCATCTTTCATA | |
| | | | CGCATTTTGCTTTTTGCGGTTGTGGTGACCCTGTT | |
| | | | GGGCGTATTAACCGCATTGCTCACCGCTTTCCTAA | |
| | | | CGCCGGTCCCCCGAGACCACCTCCAGGGCTAGAC | |
| | | | CAGCCCAACCTCGGAGGGCCGGAAGGTCCAGGAG | |
| | | | GTGCCCCTAGAGCCCTGCCAGCCCTGCCGGCCCC | |
| | | | GGCAGAGCCAGAGCCGGCACCACGGCGTGGTGG | |
| | | | TGGGGCCGATGGAGACAGCGCCGCTGGGGCCGC | |
| | | | CGCCGCCGCAGACCATGGAGGGTACGACGAAGGA | |
| | | | GACCTAGAAGATCTTTTCGCCGCCGCCGCCGAGG | |
| | | | ACGATATGGCCTTTATCAAGAAAAAGAAACAAGCT | |
| | | | CGACACAAAGATGCCAGGCCCCCCAACCCCCGAA | |
| | | | AAAGAAAGCTACACTTTACTCCAAGCCCTCCAAGA | |
| | | | GTCGGGCCAGGAGAGCAGCTCCCAGGACGAAGAA | |
| | | | CAAGCACCCCAAAAAGAAGAGAACCAGAAAGAAGC | |
| | | | GCTCGTGGAGCAGCTCCAGCTCCAGAAACAGCAC | |
| | | | CAGCGAGTCCTCAAGCGAGGCCTCAAACTCCTCTT | |
| | | | GGGAGACGTCCTCCGACTCCGCCGCGGAGTCCAC | |
| | | | TGGGACCCCCTCCTATCCTAATTCAGGGTCCCTCT | |
| | | | ATCCCAGACCTGCTTTTCCCTAACACTCAAAAAAAA | |
| | | | CCCAAATTTTCCAACTTCGACTGGGCCACCGAGTA | |
| | | | CCAAATAGCCAAGTGGCCAGACCGCCCTTTGAGG | |
| | | | CACTACCCCTCAGACCTCCCTCACTACCCGTGGCT | |
| | | | ACCAAAAAAGCCACCTACCCAGCCTACATGTAGAG | |
| | | | TAAGTTTCAAATTAAAGCTTGATGCCTAA | |
| AB064604.1 | BAB79343.1 | ORF4 | ATGAGTATTTGGAGGCCTCCACTGCACAATGTCCC | 687 |
| | | | GGGACTCGAACACCTCTGGTACGAGTCAGTGCATC | |
| | | | GTAGCCATGCTGCTGTTTGTGGCTGTGGGGATCCT | |
| | | | GTACGCCATCTTACTGCTCTTGCTGAAAGATATGG | |
| | | | CATTCCGGGAGGGTCGCGGTCTTCTGGGGCACCG | |
| | | | GGAGTAGGGGGCAACCACAACCCTCCCCAGATCC | |
| | | | GTCGAGCCCGCCACCCGGCGGCTGCTCCGGACCC | |
| | | | CCCAGCAGGTAACCAGCCTCCGGCCCTGCCATGG | |
| | | | CATGGGGATGGTGGAAACGAAAGCGGCGCTGGTG | |
| | | | GTGGAGAAAGCGGTGGACCCGTGGCCGACTTCGC | |
| | | | AGACGATGGCCTAGACGATCTCGTCGCCGCCCTC | |
| | | | GACGAAGAAGAAAGAAGACTTCAATATCCAAGAGA | |
| | | | GACAACAAAGAGAACAGAGACCGTGGACGAGCGA | |
| | | | AAGCGAGAGCGAAGCAGAAGCCCAAGAAGAGACG | |
| | | | CAGGCGGGCTCGGTCCGAGAGCAGCTCCAGCAGC | |
| | | | AGCTCCAAGAGCAGTTTCAACTCCGAAGAGGGCTC | |
| | | | AAGTGCCTCTTCGAGCAGTTAGTCAGAACCCAACA | |
| | | | GGGAGTCCACGTAGATCCCTGCCTCGTGTAGGCC | |
| | | | CGGAGCAGTGGCTACTCCCCGAGAGAAAGCCTAA | |
| | | | GCCCGCTCCTACTTCAGGAGACTGGGCTATGGAGT | |
| | | | ACCTAATGTGCAAAATAATGAATAGGCCTCCTCGC | |
| | | | TCTCAGCTTACTGACCCCCCATTTTACCCTTACTGC | |
| | | | AAAAATAATTACAATGTAACCTTTCAGCTTAACTAC | |
| | | | AAATAA | |
| AB064606.1 | BAB79351.1 | ORF4 | ATGAGCTTCTGGAGACCTCCGGTGCACAATGCCAC | 688 |
| | | | GGGGATCCAGCGCCTGTGGTACGAGTCCTTTCAC | |
| | | | CGTGGCCATGCTGCTTTTTGTGGTTGTGGGGATCC | |
| | | | TATACTTCACATTACTGCACTTGCTGAGACATATGG | |
| | | | CCATCCAACAGGCCCGAGACCTTCTGGGCCACCG | |
| | | | CGAGTAGACCCCGATCCCCAGATCCGTAGAGCCA | |
| | | | GGCCTGCCCCGGCCGCTCCGGAGCCCTCACAGGT | |
| | | | TGAGCCGAGACCTGCCCTGCCATGGCATGGGGAT | |
| | | | GGTGGAAGCGACGGCGGCGCTGGTGGTTCCGGA | |
| | | | AGCGGTGGACCCGTGGCAGACTTCGCAGACGATG | |
| | | | GCCTCGATCAGCTCGTCGCCGCCCTAGACGACGA | |
| | | | AGAAAAAAGGCTCAGATTCACTCCAAAGAGAATCG | |
| | | | AGACCGTGGAGCAACTCGGAGACCGAGGCAGAGA | |
| | | | CAGAAGCCCCCTCGGAAGAAGAGCCGGAGAACCA | |
| | | | AGAAGAACAAGTACTCCAGTTGCAGCTCCGACAGC | |
| | | | AGCTCCGAGAACAGCGAAAACTCAGACAGGGAAT | |
| | | | CCAGTGCCTCTTCGAGCAACTGATAACAACCCAAC | |
| | | | AGGGGGTTCACAAAAACCCATTGCTAGAGTAGGCC | |
| | | | CAGAGCAGTGGCTGTTTCCCGAGAGAAAGCCAAAA | |
| | | | CCACCTCCCACCGCCCAGGACTGGGCGGAGGAGT | |
| | | | ACACTGCCTGTAAATACTGGGGTAGGCCACCTCGC | |
| | | | AAATTCCTCACAGACACGCCATTCTATACTCACTGC | |
| | | | AAGACCAATTACAATGTAACCTTTATGCTTAACTAT | |
| | | | CAATAA | |
| FJ426280.1 | A0K44074.1 | ORF4 | ATGGGACTGGCGACGGGGGCTTTTTGGTGCAGAT | 689 |
| | | | GCTATCCAGAGAGTGTCACAAAAACCGGAAGATGC | |
| | | | TCTCCGCTTTACAAACCCTTTCAAGAGACCCAGATA | |
| | | | TCTTCCCCCGACAGACGGAGAAGACTACCGACAA | |
| | | | GAAGAAGACTTCGCTTTACAGGAAAGAAGACGGCG | |
| | | | CACATCCACAGAAGAAGTCCAGGACGAGGAGAGC | |
| | | | CCCCCGCAAAACGCGCCGCTCCTACAGCAGCAGC | |
| | | | AGCAGCAGCGGGAGCTCTCAGTCCAGCACGCGGA | |
| | | | GCAGCAGCGACTCGGAGTCCAACTCCGATACATC | |
| | | | CTCCAAGAAGTCCTCAAAACGCAAGCGGGTCTCCA | |
| | | | CCTAAACCCCCTATTATTAGGCCCGCCACAAACAA | |
| | | | GGTGTATATCTTTGAGCCCCCCAGAGGCCTACTCC | |
| | | | CCATAGTGGGAAAAGAAGCCTGGGAGGACGAGTA | |
| | | | CTGCACCTGCAAGTACTGGGATCGCCCTCCCAGAA | |
| | | | CCAACCACCTAGACACCCCCACTTATCCCTAG | |

[0468] In some embodiments, the genetic element may comprise one or more sequences or a fragment of a sequence from a substantially non-pathogenic virus having at least about 60%, 70% 80%, 85%, 90% 95%, 96%, 97%, 98% and 99% nucleotide sequence identity to any one of the nucleotide sequences described herein, e.g., Table 20.

TABLE 20
Examples of Anelloviruses and their sequences.
Accessions numbers and related sequence information
may be obtained at www.ncbi.nlm.nih.gov/genbank/,
as referenced on Jun. 12, 2017.

| Accession # | Description |
|---|---|
| AB026345.1 | TT virus genes for ORF1 and ORF2, complete cds, isolate: |
| | TRM1 |
| AB026346.1 | TT virus genes for ORF1 and ORF2, complete cds, isolate: |
| | TK16 |
| AB026347.1 | TT virus genes for ORF1 and ORF2, complete cds, isolate: |
| | TP1-3 |
| AB030487.1 | TT virus gene for pORF2a, pORF2b, pORF1, complete cds, |
| | clone: JaCHCTC19 |
| AB030488.1 | TT virus gene for pORF2a, pORF2b, pORF1, complete cds, |
| | clone: JaBD89 |
| AB030489.1 | TT virus gene for pORF2a, pORF2b, pORF1, complete cds, |
| | clone: JaBD89 |
| AB038340.1 | TT virus genes for ORF2s, ORF1, ORF3, complete cds |
| AB038622.1 | TT virus genes for ORF2, ORF1, ORF3, complete cds, |
| | isolate: TTVyon-LC011 |
| AB038623.1 | TT virus genes for ORF2, ORF1, ORF3, complete cds, |
| | isolate: TTVyon-KC186 |
| AB038624.1 | TT virus genes for ORF2, ORF1, ORF3, complete cds, |
| | isolate: TTVyon-KC197 |
| AB041821.1 | TT virus mRNA for VP1, complete cds |
| AB050448.1 | Torque teno virus genes for ORF1, ORF2, ORF3, ORF4, |
| | complete cds, isolate: TYM9 |
| AB060592.1 | Torque teno virus gene for ORF1, ORF2, ORF3, ORF4, |
| | clone: SAa-39 |
| AB060593.1 | Torque teno virus gene for ORF1, ORF2, ORF3, ORF4, |
| | complete cds, clone: SAa-38 |
| AB060595.1 | TT virus gene for ORF1, ORF2, ORF3, ORF4, complete |
| | cds, clone: SAj-30 |
| AB060596.1 | TT virus gene for ORF1, ORF2, ORF3, ORF4, complete |
| | cds, clone: SAf-09 |
| AB064596.1 | Torque teno virus DNA, complete genome, isolate: CT25F |
| AB064597.1 | Torque teno virus DNA, complete genome, isolate: CT30F |
| AB064599.1 | Torque teno virus DNA, complete genome, isolate: JT03F |
| AB064600.1 | Torque teno virus DNA, complete genome, isolate: JT05F |
| AB064601.1 | Torque teno virus DNA, complete genome, isolate: JT14F |
| AB064602.1 | Torque teno virus DNA, complete genome, isolate: JT19F |
| AB064603.1 | Torque teno virus DNA, complete genome, isolate: JT41F |
| AB064604.1 | Torque teno virus DNA, complete genome, isolate: CT39F |
| AB064606.1 | Torque teno virus DNA, complete genome, isolate: JT33F |
| AF079173.1 | TT virus strain TTVCHN1, complete genome |
| AF116842.1 | TT virus strain BDH1, complete genome |
| AF122917.1 | TT virus isolate JA4, complete genome |
| AF122919.1 | TT virus isolate JA10 unknown genes |
| AF129887.1 | TT virus TTVCHN2, complete genome |
| AF254410.1 | TT virus ORF2 protein and ORF1 protein genes, |
| | complete cds |
| AF298585.1 | TT virus Polish isolate P/1C1, complete genome |
| AF315076.1 | TTV-like virus DXL1 unknown genes |
| AF315077.1 | TTV-like virus DXL2 unknown genes |
| AF345521.1 | TT virus isolate TCHN-G1 Orf2 and Orf1 genes, |
| | complete cds |
| AF345522.1 | TT virus isolate TCHN-E Orf2 and Orf1 genes, |
| | complete cds |
| AF345525.1 | TT virus isolate TCHN-D2 Orf2 and Orf1 genes, |
| | complete cds |
| AF345527.1 | TT virus isolate TCHN-C2 Orf2 and Orf1 genes, |
| | complete cds |
| AF345528.1 | TT virus isolate TCHN-F Orf2 and Orf1 genes, |
| | complete cds |
| AF345529.1 | TT virus isolate TCHN-G2 Orf2 and Orf1 genes, |
| | complete cds |
| AF371370.1 | TT virus ORF1, ORF3, and ORF2 genes, complete cds |
| AJ620212.1 | Torgue teno virus, isolate tth6, complete genome |
| AJ620213.1 | Torgue teno virus, isolate tth10, complete genome |
| AJ620214.1 | Torgue teno virus, isolate tth11g2, complete genome |
| AJ620215.1 | Torgue teno virus, isolate tth18, complete genome |
| AJ620216.1 | Torgue teno virus, isolate tth20, complete genome |
| AJ620217.1 | Torgue teno virus, isolate tth21, complete genome |
| AJ620218.1 | Torgue teno virus, isolate tth3, complete genome |
| AJ620219.1 | Torgue teno virus, isolate tth9, complete genome |
| AJ620220.1 | Torgue teno virus, isolate tth16, complete genome |
| AJ620221.1 | Torgue teno virus, isolate tth17, complete genome |
| AJ620222.1 | Torgue teno virus, isolate tth25, complete genome |
| AJ620223.1 | Torgue teno virus, isolate tth26, complete genome |
| AJ620224.1 | Torgue teno virus, isolate tth27, complete genome |
| AJ620225.1 | Torgue teno virus, isolate tth31, complete genome |
| AJ620226.1 | Torgue teno virus, isolate tth4, complete genome |
| AJ620227.1 | Torgue teno virus, isolate tth5, complete genome |
| AJ620228.1 | Torgue teno virus, isolate tth14, complete genome |
| AJ620229.1 | Torgue teno virus, isolate tth29, complete genome |
| AJ620230.1 | Torgue teno virus, isolate tth7, complete genome |
| AJ620231.1 | Torgue teno virus, isolate tth8, complete genome |
| AJ620232.1 | Torgue teno virus, isolate tth13, complete genome |
| AJ620233.1 | Torgue teno virus, isolate tth19, complete genome |
| AJ620234.1 | Torgue teno virus, isolate tth22g4, complete genome |
| AJ620235.1 | Torgue teno virus, isolate tth23, complete genome |
| AM711976.1 | TT virus sle1957 complete genome |
| AM712003.1 | TT virus sle1931 complete genome |
| AM712004.1 | TT virus sle1932 complete genome |
| AM712030.1 | TT virus sle2057 complete genome |
| AM712031.1 | TT virus sle2058 complete genome |
| AM712032.1 | TT virus sle2072 complete genome |
| AM712033.1 | TT virus sle2061 complete genome |
| AM712034.1 | TT virus sle2065 complete genome |
| AY026465.1 | TT virus isolate L01 ORF2 and ORF1 genes, complete cds |
| AY026466.1 | TT virus isolate L02 ORF2 and ORF1 genes, complete cds |
| DQ003341.1 | Torque teno virus clone P2-9-02 ORF2 (ORF2), ORF1A |
| | (ORF1A), and ORF1B (ORF1B) genes, complete cds |
| DQ003342.1 | Torque teno virus clone P2-9-07 ORF2 (ORF2), ORF1A |
| | (ORF1A), and ORF1B (ORF1B) genes, complete cds |
| DQ003343.1 | Torque teno virus clone P2-9-08 ORF2 (ORF2), ORF1A |
| | (ORF1A), and ORF1B (ORF1B) genes, complete cds |
| DQ003344.1 | Torque teno virus clone P2-9-16 ORF2 (ORF2), ORF1A |
| | (ORF1A), and ORF1B (ORF1B) genes, complete cds |
| DQ186994.1 | Torque teno virus clone P601 ORF2 (ORF2) and ORF1 |
| | (ORF1) genes, complete cds |
| DQ186995.1 | Torque teno virus clone P605 ORF2 (ORF2) and ORF1 |
| | (ORF1) genes, complete cds |
| DQ186996.1 | Torque teno virus clone BM1A-02 ORF2 (ORF2) and |
| | ORF1 (ORF1) genes, complete cds |
| DQ186997.1 | Torque teno virus clone BM1A-09 ORF2 (ORF2) and |
| | ORF1 (ORF1) genes, complete cds |
| DQ186998.1 | Torque teno virus clone BM1A-13 ORF2 (ORF2) and |
| | ORF1 (ORF1) genes, complete cds |
| DQ186999.1 | Torque teno virus clone BM1B-05 ORF2 (ORF2) and |
| | ORF1 (ORF1) genes, complete cds |
| DQ187000.1 | Torque teno virus clone BM1B-07 ORF2 (ORF2) and |
| | ORF1 (ORF1) genes, complete cds |
| DQ187001.1 | Torque teno virus clone BM1B-11 ORF2 (ORF2) and |
| | ORF1 (ORF1) genes, complete cds |
| DQ187002.1 | Torque teno virus clone BM1 B-14 ORF2 (ORF2) and |
| | ORF1 (ORF1) genes, complete cds |
| DQ187003.1 | Torque teno virus clone BM1B-08 ORF2 (ORF2) gene, |
| | complete cds; and nonfunctional ORF1 (ORF1) gene, |
| | complete sequence |
| DQ187004.1 | Torque teno virus clone BM1C-16 ORF2 (ORF2) and |
| | ORF1 (ORF1) genes, complete cds |
| DQ187005.1 | Torque teno virus clone BM1C-10 ORF2 (ORF2) and |
| | ORF1 (ORF1) genes, complete cds |
| DQ187007.1 | Torque teno virus clone BM2C-25 ORF2 (ORF2) gene, |
| | complete cds; and nonfunctional ORF1 (ORF1) gene, |
| | complete sequence |
| DQ361268.1 | Torque teno virus isolate ViPi04 ORF1 gene, |
| | complete cds |
| EF538879.1 | Torque teno virus isolate CSC5 ORF2 and ORF1 |
| | genes, complete cds |
| EU305675.1 | Torque teno virus isolate LTT7 ORF1 gene, complete |
| | cds |
| EU305676.1 | Torque teno virus isolate LTT10 ORF1 gene, complete |
| | cds |
| EU889253.1 | Torque teno virus isolate ViPiO8 nonfunctional ORF1 |
| | gene, complete sequence |
| FJ392105.1 | Torque teno virus isolate TW53A25 ORF2 gene, partial |
| | cds; and ORF1 gene, complete cds |
| FJ392107.1 | Torque teno virus isolate TW53A27 ORF2 gene, partial |
| | cds; and ORF1 gene, complete cds |
| FJ392108.1 | Torque teno virus isolate TW53A29 ORF2 gene, partial |
| | cds; and ORF1 gene, complete cds |
| FJ392111.1 | Torque teno virus isolate TW53A35 ORF2 gene, partial |
| | cds; and ORF1 gene, complete cds |
| FJ392112.1 | Torque teno virus isolate TW53A39 ORF2 gene, partial |
| | cds; and ORF1 gene, complete cds |
| FJ392113.1 | Torque teno virus isolate TW53A26 ORF2 gene, complete |
| | cds; and nonfunctional ORF1 gene, complete sequence |
| FJ392114.1 | Torque teno virus isolate TW53A30 ORF2 and ORF1 |
| | genes, complete cds |
| FJ392115.1 | Torque teno virus isolate TW53A31 ORF2 and ORF1 |
| | genes, complete cds |
| FJ392117.1 | Torque teno virus isolate TW53A37 ORF1 gene, complete |
| | cds |
| FJ426280.1 | Torque teno virus strain SIA109, complete genome |
| GU797360.1 | Torque teno virus clone 8-17, complete genome |
| HC742700.1 | Sequence 7 from Patent WO2010044889 |
| HC742710.1 | Sequence 17 from Patent WO2010044889 |

[0469] In some embodiments, the genetic element comprises one or more sequences with homology or identity to one or more sequences from one or more non-anelloviruses, e.g., adenovirus, herpes virus, pox virus, vaccinia virus, SV40, papilloma virus, an RNA virus such as a retrovirus, e.g., lenti virus, a single-stranded RNA virus, e.g., hepatitis virus, or a double-stranded RNA virus e.g., rotavirus. Since, in some embodiments, recombinant retroviruses are defective, assistance may be provided order to produce infectious particles. Such assistance can be provided, e.g., by using helper cell lines that contain plasmids encoding all of the structural genes of the retrovirus under the control of regulatory sequences within the LTR. Suitable cell lines for replicating the curons described herein include cell lines known in the art, e.g., A549 cells, which can be modified as described herein. Said genetic element can additionally contain a gene encoding a selectable marker so that the desired genetic elements can be identified.

[0470] In some embodiments, the genetic element includes non-silent mutations, e.g., base substitutions, deletions, or additions resulting in amino acid differences in the encoded polypeptide, so long as the sequence remains at least about 70%, 75%, 80%, 85%, 90%, 95%, 96%, 97%, 98%, or 99% identical to the polypeptide encoded by the first nucleotide sequence or otherwise is useful for practicing the present invention. In this regard, certain conservative amino acid substitutions may be made which are generally recognized not to inactivate overall protein function: such as in regard of positively charged amino acids (and vice versa), lysine, arginine and histidine; in regard of negatively charged amino acids (and vice versa), aspartic acid and glutamic acid; and in regard of certain groups of neutrally charged amino acids (and in all cases, also vice versa), (1) alanine and serine, (2) asparagine, glutamine, and histidine, (3) cysteine and serine, (4) glycine and proline, (5) isoleucine, leucine and valine, (6) methionine, leucine and isoleucine, (7) phenylalanine, methionine, leucine, and tyrosine, (8) serine and threonine, (9) tryptophan and tyrosine, (10) and for example tyrosine, tryptophan and phenylalanine. Amino acids can be classified according to physical properties and contribution to secondary and tertiary protein structure. A conservative substitution is recognized in the art as a substitution of one amino acid for another amino acid that has similar properties.

[0471] Identity of two or more nucleic acid or polypeptide sequences having the same or a specified percentage of nucleotides or amino acid residues that are the same (e.g., about 60%, 65%, 70%, 75%, 80%, 85%, 90%, 91%, 92%, 93%, 94%, 95%, 96%, 97%, 98%, 99%, or higher identity over a specified region, when compared and aligned for maximum correspondence over a comparison window or designated region) may be measured using a BLAST or BLAST 2.0 sequence comparison algorithms with default parameters described below, or by manual alignment and visual inspection (see, e.g., NCBI web site www.ncbi.nlm.nih.gov/BLAST/ or the like). Identity may also refer to, or may be applied to, the compliment of a test sequence. Identity also includes sequences that have deletions and/or additions, as well as those that have substitutions. As described herein, the algorithms account for gaps and the like. Identity may exist over a region that is at least about 10 amino acids or nucleotides in length, about 15 amino acids or nucleotides in length, about 20 amino acids or nucleotides in length, about 25 amino acids or nucleotides in length, about 30 amino acids or nucleotides in length, about 35 amino acids or nucleotides in length, about 40 amino acids or nucleotides in length, about 45 amino acids or nucleotides in length, about 50 amino acids or nucleotides in length, or more.

[0472] In some embodiments, the genetic element comprises a nucleotide sequence with at least about 75% nucleotide sequence identity, at least about 80%, 85%, 90% 95%, 96%, 97%, 98%, 99% or 100% nucleotide sequence identity to any one of the nucleotide sequences described herein, e.g., Table 19 or Table 20. Since the genetic code is degenerate, a homologous nucleotide sequence can include any number of “silent” base changes, i.e. nucleotide substitutions that nonetheless encode the same amino acid.

[0473] Gene Editing Component

[0474] The genetic element of the synthetic curon may include one or more genes that encode a component of a gene editing system. Exemplary gene editing systems include the clustered regulatory interspaced short palindromic repeat (CRISPR) system, zinc finger nucleases (ZFNs), and Transcription Activator-Like Effector-based Nucleases (TALEN). ZFNs, TALENs, and CRISPR-based methods are described, e.g., in Gaj et al. Trends Biotechnol. 31.7(2013):397-405; CRISPR methods of gene editing are described, e.g., in Guan et al., Application of CRISPR-Cas system in gene therapy: Pre-clinical progress in animal model. DNA Repair 2016 October; 46:1-8. doi: 10.1016/j.dnarep.2016.07.004; Zheng et al., Precise gene deletion and replacement using the CRISPR/Cas9 system in human cells. BioTechniques, Vol. 57, No. 3, September 2014, pp. 115-124.

[0475] CRISPR systems are adaptive defense systems originally discovered in bacteria and archaea. CRISPR systems use RNA-guided nucleases termed CRISPR-associated or “Cas” endonucleases (e. g., Cas9 or Cpf1) to cleave foreign DNA. In a typical CRISPR/Cas system, an endonuclease is directed to a target nucleotide sequence (e. g., a site in the genome that is to be sequence-edited) by sequence-specific, non-coding “guide RNAs” that target single- or double-stranded DNA sequences. Three classes (I-III) of CRISPR systems have been identified. The class II CRISPR systems use a single Cas endonuclease (rather than multiple Cas proteins). One class II CRISPR system includes a type II Cas endonuclease such as Cas9, a CRISPR RNA (“crRNA”), and a trans-activating crRNA (“tracrRNA”). The crRNA contains a “guide RNA”, typically about 20-nucleotide RNA sequence that corresponds to a target DNA sequence. The crRNA also contains a region that binds to the tracrRNA to form a partially double-stranded structure which is cleaved by RNase III, resulting in a crRNA/tracrRNA hybrid. The crRNA/tracrRNA hybrid then directs the Cas9 endonuclease to recognize and cleave the target DNA sequence. The target DNA sequence must generally be adjacent to a “protospacer adjacent motif” (“PAM”) that is specific for a given Cas endonuclease; however, PAM sequences appear throughout a given genome.

[0476] In some embodiments, the curon includes a gene for a CRISPR endonuclease. For example, some CRISPR endonucleases identified from various prokaryotic species have unique PAM sequence requirements; examples of PAM sequences include 5′-NGG (Streptococcus pyogenes), 5′-NNAGAA (Streptococcus thermophilus CRISPR1), 5′-NGGNG (Streptococcus thermophilus CRISPR3), and 5′-NNNGATT (Neisseria meningiditis). Some endonucleases, e. g., Cas9 endonucleases, are associated with G-rich PAM sites, e. g., 5′-NGG, and perform blunt-end cleaving of the target DNA at a location 3 nucleotides upstream from (5′ from) the PAM site. Another class II CRISPR system includes the type V endonuclease Cpf1, which is smaller than Cas9; examples include AsCpf1 (from Acidaminococcus sp.) and LbCpf1 (from Lachnospiraceae sp.). Cpf1 endonucleases, are associated with T-rich PAM sites, e. g., 5′-TTN. Cpf1 can also recognize a 5′-CTA PAM motif. Cpf1 cleaves the target DNA by introducing an offset or staggered double-strand break with a 4- or 5-nucleotide 5′ overhang, for example, cleaving a target DNA with a 5-nucleotide offset or staggered cut located 18 nucleotides downstream from (3′ from) from the PAM site on the coding strand and 23 nucleotides downstream from the PAM site on the complimentary strand; the 5-nucleotide overhang that results from such offset cleavage allows more precise genome editing by DNA insertion by homologous recombination than by insertion at blunt-end cleaved DNA. See, e. g., Zetsche et al. (2015) Cell, 163:759-771.

[0477] A variety of CRISPR associated (Cas) genes may be included in the curon. Specific examples of genes are those that encode Cas proteins from class II systems including Cas1, Cas2, Cas3, Cas4, Cas5, Cas6, Cas7, Cas8, Cas9, Cas10, Cpf1, C2C1, or C2C3. In some embodiments, the curon includes a gene encoding a Cas protein, e.g., a Cas9 protein, may be from any of a variety of prokaryotic species. In some embodiments, the curon includes a gene encoding a particular Cas protein, e.g., a particular Cas9 protein, is selected to recognize a particular protospacer-adjacent motif (PAM) sequence. In some embodiments, the curon includes nucleic acids encoding two or more different Cas proteins, or two or more Cas proteins, may be introduced into a cell, zygote, embryo, or animal, e.g., to allow for recognition and modification of sites comprising the same, similar or different PAM motifs. In some embodiments, the curon includes a gene encoding a modified Cas protein with a deactivated nuclease, e.g., nuclease-deficient Cas9.

[0478] Whereas wild-type Cas9 protein generates double-strand breaks (DSBs) at specific DNA sequences targeted by a gRNA, a number of CRISPR endonucleases having modified functionalities are known, for example: a “nickase” version of Cas9 generates only a single-strand break; a catalytically inactive Cas9 (“dCas9”) does not cut the target DNA. A gene encoding a dCas9 can be fused with a gene encoding an effector domain to repress (CRISPRi) or activate (CRISPRa) expression of a target gene. For example, the gene may encode a Cas9 fusion with a transcriptional silencer (e.g., a KRAB domain) or a transcriptional activator (e.g., a dCas9-VP64 fusion). A gene encoding a catalytically inactive Cas9 (dCas9) fused to FokI nuclease (“dCas9-FokI”) can be included to generate DSBs at target sequences homologous to two gRNAs. See, e. g., the numerous CRISPR/Cas9 plasmids disclosed in and publicly available from the Addgene repository (Addgene, 75 Sidney St., Suite 550A, Cambridge, Mass. 02139; addgene.org/crispr/). A “double nickase” Cas9 that introduces two separate double-strand breaks, each directed by a separate guide RNA, is described as achieving more accurate genome editing by Ran et al. (2013) Cell, 154:1380-1389.

[0479] CRISPR technology for editing the genes of eukaryotes is disclosed in US Patent Application Publications 2016/0138008A1 and US2015/0344912A1, and in U.S. Pat. Nos. 8,697,359, 8,771,945, 8,945,839, 8,999,641, 8,993,233, 8,895,308, 8,865,406, 8,889,418, 8,871,445, 8,889,356, 8,932,814, 8,795,965, and 8,906,616. Cpf1 endonuclease and corresponding guide RNAs and PAM sites are disclosed in US Patent Application Publication 2016/0208243 A1.

[0480] In some embodiments, the curon comprises a gene encoding a polypeptide described herein, e.g., a targeted nuclease, e.g., a Cas9, e.g., a wild type Cas9, a nickase Cas9 (e.g., Cas9 D10A), a dead Cas9 (dCas9), eSpCas9, Cpf1, C2C1, or C2C3, and a gRNA. The choice of genes encoding the nuclease and gRNA(s) is determined by whether the targeted mutation is a deletion, substitution, or addition of nucleotides, e.g., a deletion, substitution, or addition of nucleotides to a targeted sequence. Genes that encode a catalytically inactive endonuclease e.g., a dead Cas9 (dCas9, e.g., D10A; H840A) tethered with all or a portion of (e.g., biologically active portion of) an (one or more) effector domain (e.g., VP64) create chimeric proteins that can modulate activity and/or expression of one or more target nucleic acids sequences.

[0481] As used herein, a “biologically active portion of an effector domain” is a portion that maintains the function (e.g. completely, partially, or minimally) of an effector domain (e.g., a “minimal” or “core” domain). In some embodiments, the curon includes a gene encoding a fusion of a dCas9 with all or a portion of one or more effector domains to create a chimeric protein useful in the methods described herein. Accordingly, in some embodiments, the curon includes a gene encoding a dCas9-methylase fusion. In other some embodiments, the curon includes a gene encoding a dCas9-enzyme fusion with a site-specific gRNA to target an endogenous gene.

[0482] In other aspects, the curon includes a gene encoding 1, 2, 3, 4, 5, 6, 7, 8, 9, 10, 11, 12, 13, 14, 15, 16, 17, 18, 19, 20, or more effector domains (all or a biologically active portion) fused with dCas9.

### Proteinaceous Exterior

[0483] In some embodiments, the curon, e.g., synthetic curon, comprises a proteinaceous exterior that encloses the genetic element. The proteinaceous exterior can comprise a substantially non-pathogenic exterior protein that fails to elicit an immune response in a mammal. In some embodiments, the synthetic curon lacks lipids in the proteinaceous exterior. In some embodiments, the synthetic curon lacks a lipid bilayer, e.g., a viral envelope. In some embodiments, the interior of the synthetic curon is entirely covered (e.g., 100% coverage) by a proteinaceous exterior. In some embodiments, the interior of the synthetic curon is less than 100% covered by the proteinaceous exterior, e.g., 95%, 90%, 85%, 80%, 70%, 60%, 50% or less coverage. In some embodiments, the proteinaceous exterior comprises gaps or discontinuities, e.g., permitting permeability to water, ions, peptides, or small molecules, so long as the genetic element is retained in the curon.

[0484] In some embodiments, the proteinaceous exterior comprises one or more proteins or polypeptides that specifically recognize and/or bind a host cell, e.g., a complementary protein or polypeptide, to mediate entry of the genetic element into the host cell.

[0485] In some embodiments, the proteinaceous exterior comprises one or more of the following: one or more glycosylated proteins, a hydrophilic DNA-binding region, an arginine-rich region, a threonine-rich region, a glutamine-rich region, a N-terminal polyarginine sequence, a variable region, a C-terminal polyglutamine/glutamate sequence, and one or more disulfide bridges.

[0486] In some embodiments, the proteinaceous exterior comprises one or more of the following characteristics: an icosahedral symmetry, recognizes and/or binds a molecule that interacts with one or more host cell molecules to mediate entry into the host cell, lacks lipid molecules, lacks carbohydrates, is pH and temperature stable, is detergent resistant, and is substantially non-immunogenic or non-pathogenic in a host.

### Vectors

[0487] The genetic element described herein may be included in a vector. Suitable vectors as well as methods for their manufacture and their use are well known in the prior art.

[0488] In one aspect, the invention includes a vector comprising a genetic element comprising (i) a sequence encoding a non-pathogenic exterior protein, (ii) an exterior protein binding sequence that binds the genetic element to the non-pathogenic exterior protein, and (iii) a sequence encoding a regulatory nucleic acid.

[0489] The genetic element or any of the sequences within the genetic element can be obtained using any suitable method. Various recombinant methods are known in the art, such as, for example screening libraries from cells harboring viral sequences, deriving the sequences from a vector known to include the same, or isolating directly from cells and tissues containing the same, using standard techniques. Alternatively or in combination, part or all of the genetic element can be produced synthetically, rather than cloned.

[0490] In some embodiments, the vector includes regulatory elements, nucleic acid sequences homologous to target genes, and various reporter constructs for causing the expression of reporter molecules within a viable cell and/or when an intracellular molecule is present within a target cell.

[0491] Reporter genes are used for identifying potentially transfected cells and for evaluating the functionality of regulatory sequences. In general, a reporter gene is a gene that is not present in or expressed by the recipient organism or tissue and that encodes a polypeptide whose expression is manifested by some easily detectable property, e.g., enzymatic activity. Expression of the reporter gene is assayed at a suitable time after the DNA has been introduced into the recipient cells. Suitable reporter genes may include genes encoding luciferase, beta-galactosidase, chloramphenicol acetyl transferase, secreted alkaline phosphatase, or the green fluorescent protein gene (e.g., Ui-Tei et al., 2000 FEBS Letters 479: 79-82). Suitable expression systems are well known and may be prepared using known techniques or obtained commercially. In general, the construct with the minimal 5′ flanking region showing the highest level of expression of reporter gene is identified as the promoter. Such promoter regions may be linked to a reporter gene and used to evaluate agents for the ability to modulate promoter-driven transcription.

[0492] In some embodiments, the vector is substantially non-pathogenic and/or substantially non-integrating in a host cell or is substantially non-immunogenic in a host.

[0493] In some embodiments, the vector is in an amount sufficient to modulate one or more of phenotype, virus levels, gene expression, compete with other viruses, disease state, etc. at least about 5%, 10%, 15%, 20%, 25%, 30%, 35%, 40%, 45%, 50%, or more.

### Compositions

[0494] The synthetic curon or vector described herein may also be included in pharmaceutical compositions with a pharmaceutical excipient, e.g., as described herein. In some embodiments, the pharmaceutical composition comprises at least 10⁵, 10⁶, 10⁷, 10⁸, 10⁹, 10¹⁰, 10¹¹, 10¹², 10¹³, 10¹⁴, or 10¹⁵ synthetic curons. In some embodiments, the pharmaceutical composition comprises about 10⁵-10¹⁵, 10⁵-10¹⁰, or 10¹⁰-10¹⁵ synthetic curons. In some embodiments, the pharmaceutical composition comprises about 10⁸ (e.g., about 10⁵, 10⁶, 10⁷, 10⁸, 10⁹, or 10¹⁰) genomic equivalents/mL of the synthetic curon. In some embodiments, the pharmaceutical composition comprises 10⁵-10¹⁰, 10⁶-10¹⁰, 10⁷-10¹⁰, 10⁸-10¹⁰, 10⁹-10¹⁰, 10⁵-10⁶, 10⁵-10⁷, 10⁵-10⁸, or 10⁵-10⁹ genomic equivalents/mL of the synthetic curon, e.g., as determined according to the method of Example 18. In some embodiments, the pharmaceutical composition comprises sufficient synthetic curons to deliver at least 1, 2, 5, or 10, 100, 500, 1000, 2000, 5000, 8,000, 1×10⁴, 1×10⁵, 1×10⁶, 1×10⁷ or greater copies of a genetic element comprised in the curons per cell to a population of the eukaryotic cells. In some embodiments, the pharmaceutical composition comprises sufficient synthetic curons to deliver at least about 1×10⁴, 1×10⁵, 1×10⁶, 1× or 10⁷ or about 1×10⁴-1×10⁵, 1×10⁴-1×10⁶, 1×10⁴-1×10⁷, 1×10⁵-1×10⁶, 1×10⁵-1×10⁷, or 1×10⁶- 1×10⁷ copies of a genetic element comprised in the curons per cell to a population of the eukaryotic cells.

[0495] In some embodiments, the pharmaceutical composition has one or more of the following characteristics: the pharmaceutical composition meets a pharmaceutical or good manufacturing practices (GMP) standard; the pharmaceutical composition was made according to good manufacturing practices (GMP); the pharmaceutical composition has a pathogen level below a predetermined reference value, e.g., is substantially free of pathogens; the pharmaceutical composition has a contaminant level below a predetermined reference value, e.g., is substantially free of contaminants; or the pharmaceutical composition has low immunogenicity or is substantially non-immunogenic, e.g., as described herein.

[0496] In some embodiments, the pharmaceutical composition comprises below a threshold amount of one or more contaminants. Exemplary contaminants that are desirably excluded or minimized in the pharmaceutical composition include, without limitation, host cell nucleic acids (e.g., host cell DNA and/or host cell RNA), animal-derived components (e.g., serum albumin or trypsin), replication-competent viruses, non-infectious particles, free viral capsid protein, adventitious agents, and aggregates. In embodiments, the contaminant is host cell DNA. In embodiments, the composition comprises less than about 500 ng of host cell DNA per dose. In embodiments, the pharmaceutical composition consists of less than 10% (e.g., less than about 10%, 5%, 4%, 3%, 2%, 1%, 0.5%, or 0.1%) contaminant by weight.

[0497] In one aspect, the invention described herein includes a pharmaceutical composition comprising:
[0498] a) a synthetic curon comprising a genetic element comprising (i) a sequence encoding a non-pathogenic exterior protein, (ii) an exterior protein binding sequence that binds the genetic element to the non-pathogenic exterior protein, and (iii) a sequence encoding a regulatory nucleic acid; and a proteinaceous exterior that is associated with, e.g., envelops or encloses, the genetic element; and
[0499] b) a pharmaceutical excipient.

### Vesicles

[0500] In some embodiments, the composition further comprises a carrier component, e.g., a microparticle, liposome, vesicle, or exosome. In some embodiments, liposomes comprise spherical vesicle structures composed of a uni- or multilamellar lipid bilayer surrounding internal aqueous compartments and a relatively impermeable outer lipophilic phospholipid bilayer. Liposomes may be anionic, neutral or cationic. Liposomes are generally biocompatible, nontoxic, can deliver both hydrophilic and lipophilic drug molecules, protect their cargo from degradation by plasma enzymes, and transport their load across biological membranes (see, e.g., Spuch and Navarro, Journal of Drug Delivery, vol. 2011, Article ID 469679, 12 pages, 2011. doi:10.1155/2011/469679 for review).

[0501] Vesicles can be made from several different types of lipids; however, phospholipids are most commonly used to generate liposomes as drug carriers. Vesicles may comprise without limitation DOTMA, DOTAP, DOTIM, DDAB, alone or together with cholesterol to yield DOTMA and cholesterol, DOTAP and cholesterol, DOTIM and cholesterol, and DDAB and cholesterol. Methods for preparation of multilamellar vesicle lipids are known in the art (see for example U.S. Pat. No. 6,693,086, the teachings of which relating to multilamellar vesicle lipid preparation are incorporated herein by reference). Although vesicle formation can be spontaneous when a lipid film is mixed with an aqueous solution, it can also be expedited by applying force in the form of shaking by using a homogenizer, sonicator, or an extrusion apparatus (see, e.g., Spuch and Navarro, Journal of Drug Delivery, vol. 2011, Article ID 469679, 12 pages, 2011. doi:10.1155/2011/469679 for review). Extruded lipids can be prepared by extruding through filters of decreasing size, as described in Templeton et al., Nature Biotech, 15:647-652, 1997, the teachings of which relating to extruded lipid preparation are incorporated herein by reference.

[0502] As described herein, additives may be added to vesicles to modify their structure and/or properties. For example, either cholesterol or sphingomyelin may be added to the mixture to help stabilize the structure and to prevent the leakage of the inner cargo. Further, vesicles can be prepared from hydrogenated egg phosphatidylcholine or egg phosphatidylcholine, cholesterol, and dicetyl phosphate. (see, e.g., Spuch and Navarro, Journal of Drug Delivery, vol. 2011, Article ID 469679, 12 pages, 2011. doi:10.1155/2011/469679 for review). Also, vesicles may be surface modified during or after synthesis to include reactive groups complementary to the reactive groups on the recipient cells. Such reactive groups include without limitation maleimide groups. As an example, vesicles may be synthesized to include maleimide conjugated phospholipids such as without limitation DSPE-MaL-PEG2000.

[0503] A vesicle formulation may be mainly comprised of natural phospholipids and lipids such as 1,2-distearoryl-sn-glycero-3-phosphatidyl choline (DSPC), sphingomyelin, egg phosphatidylcholines and monosialoganglioside. Formulations made up of phospholipids only are less stable in plasma. However, manipulation of the lipid membrane with cholesterol reduces rapid release of the encapsulated cargo or 1,2-dioleoyl-sn-glycero-3-phosphoethanolamine (DOPE) increases stability (see, e.g., Spuch and Navarro, Journal of Drug Delivery, vol. 2011, Article ID 469679, 12 pages, 2011. doi:10.1155/2011/469679 for review).

[0504] In embodiments, lipids may be used to form lipid microparticles. Lipids include, but are not limited to, DLin-KC2-DMA4, C12-200 and colipids disteroylphosphatidyl choline, cholesterol, and PEG-DMG may be formulated (see, e.g., Novobrantseva, Molecular Therapy-Nucleic Acids (2012) 1, e4; doi:10.1038/mtna.2011.3) using a spontaneous vesicle formation procedure. The component molar ratio may be about 50/10/38.5/1.5 (DLin-KC2-DMA or C12-200/disteroylphosphatidyl choline/cholesterol/PEG-DMG). Tekmira has a portfolio of approximately 95 patent families, in the U.S. and abroad, that are directed to various aspects of lipid microparticles and lipid microparticles formulations (see, e.g., U.S. Pat. Nos. 7,982,027; 7,799,565; 8,058,069; 8,283,333; 7,901,708; 7,745,651; 7,803,397; 8,101,741; 8,188,263; 7,915,399; 8,236,943 and 7,838,658 and European Pat. Nos. 1766035; 1519714; 1781593 and 1664316), all of which may be used and/or adapted to the present invention.

[0505] In some embodiments, microparticles comprise one or more solidified polymer(s) that is arranged in a random manner. The microparticles may be biodegradable. Biodegradable microparticles may be synthesized, e.g., using methods known in the art including without limitation solvent evaporation, hot melt microencapsulation, solvent removal, and spray drying. Exemplary methods for synthesizing microparticles are described by Bershteyn et al., Soft Matter 4:1787-1787, 2008 and in US 2008/0014144 A1, the specific teachings of which relating to microparticle synthesis are incorporated herein by reference.

[0506] Exemplary synthetic polymers which can be used to form biodegradable microparticles include without limitation aliphatic polyesters, poly (lactic acid) (PLA), poly (glycolic acid) (PGA), co-polymers of lactic acid and glycolic acid (PLGA), polycarprolactone (PCL), polyanhydrides, poly(ortho)esters, polyurethanes, poly(butyric acid), poly(valeric acid), and poly(lactide-co-caprolactone), and natural polymers such as albumin, alginate and other polysaccharides including dextran and cellulose, collagen, chemical derivatives thereof, including substitutions, additions of chemical groups such as for example alkyl, alkylene, hydroxylations, oxidations, and other modifications routinely made by those skilled in the art), albumin and other hydrophilic proteins, zein and other prolamines and hydrophobic proteins, copolymers and mixtures thereof. In general, these materials degrade either by enzymatic hydrolysis or exposure to water, by surface or bulk erosion.

[0507] The microparticles' diameter ranges from 0.1-1000 micrometers (μm). In some embodiments, their diameter ranges in size from 1-750 μm, or from 50-500 μm, or from 100-250 μm. In some embodiments, their diameter ranges in size from 50-1000 μm, from 50-750 μm, from 50-500 μm, or from 50-250 μm. In some embodiments, their diameter ranges in size from 0.05-1000 μm, from 10-1000 μm, from 100-1000 μm, or from 500-1000 μm. In some embodiments, their diameter is about 0.5 μm, about 10 μm, about 50 μm, about 100 μm, about 200 μm, about 300 μm, about 350 μm, about 400 μm, about 450 μm, about 500 μm, about 550 μm, about 600 μm, about 650 μm, about 700 μm, about 750 μm, about 800 μm, about 850 μm, about 900 μm, about 950 μm, or about 1000 μm. As used in the context of microparticle diameters, the term “about” means +/−5% of the absolute value stated.

[0508] In some embodiments, a ligand is conjugated to the surface of the microparticle via a functional chemical group (carboxylic acids, aldehydes, amines, sulfhydryls and hydroxyls) present on the surface of the particle and present on the ligand to be attached. Functionality may be introduced into the microparticles by, for example, during the emulsion preparation of microparticles, incorporation of stabilizers with functional chemical groups.

[0509] Another example of introducing functional groups to the microparticle is during post-particle preparation, by direct crosslinking particles and ligands with homo- or heterobifunctional crosslinkers. This procedure may use a suitable chemistry and a class of crosslinkers (CDI, EDAC, glutaraldehydes, etc. as discussed in more detail below) or any other crosslinker that couples ligands to the particle surface via chemical modification of the particle surface after preparation. This also includes a process whereby amphiphilic molecules such as fatty acids, lipids or functional stabilizers may be passively adsorbed and adhered to the particle surface, thereby introducing functional end groups for tethering to ligands.

[0510] In some embodiments, the microparticles may be synthesized to comprise one or more targeting groups on their exterior surface to target a specific cell or tissue type (e.g., cardiomyocytes). These targeting groups include without limitation receptors, ligands, antibodies, and the like. These targeting groups bind their partner on the cells' surface. In some embodiments, the microparticles will integrate into a lipid bilayer that comprises the cell surface and the mitochondria are delivered to the cell.

[0511] The microparticles may also comprise a lipid bilayer on their outermost surface. This bilayer may be comprised of one or more lipids of the same or different type. Examples include without limitation phospholipids such as phosphocholines and phosphoinositols. Specific examples include without limitation DMPC, DOPC, DSPC, and various other lipids such as those described herein for liposomes.

[0512] In some embodiments, the carrier comprises nanoparticles, e.g., as described herein.

[0513] In some embodiments, the vesicles or microparticles described herein are functionalized with a diagnostic agent. Examples of diagnostic agents include, but are not limited to, commercially available imaging agents used in positron emissions tomography (PET), computer assisted tomography (CAT), single photon emission computerized tomography, x-ray, fluoroscopy, and magnetic resonance imaging (MRI); and contrast agents. Examples of suitable materials for use as contrast agents in MRI include gadolinium chelates, as well as iron, magnesium, manganese, copper, and chromium.

### Membrane Penetrating Polypeptides

[0514] In some embodiments, the composition further comprises a membrane penetrating polypeptide (MPP) to carry the components into cells or across a membrane, e.g., cell or nuclear membrane. Membrane penetrating polypeptides that are capable of facilitating transport of substances across a membrane include, but are not limited to, cell-penetrating peptides (CPPs)(see, e.g., U.S. Pat. No. 8,603,966), fusion peptides for plant intracellular delivery (see, e.g., Ng et al., PLoS One, 2016, 11:e0154081), protein transduction domains, Trojan peptides, and membrane translocation signals (MTS) (see, e.g., Tung et al., Advanced Drug Delivery Reviews 55:281-294 (2003)). Some MPP are rich in amino acids, such as arginine, with positively charged side chains.

[0515] Membrane penetrating polypeptides have the ability of inducing membrane penetration of a component and allow macromolecular translocation within cells of multiple tissues in vivo upon systemic administration. A membrane penetrating polypeptide may also refer to a peptide which, when brought into contact with a cell under appropriate conditions, passes from the external environment in the intracellular environment, including the cytoplasm, organelles such as mitochondria, or the nucleus of the cell, in amounts significantly greater than would be reached with passive diffusion.

[0516] Components transported across a membrane may be reversibly or irreversibly linked to the membrane penetrating polypeptide. A linker may be a chemical bond, e.g., one or more covalent bonds or non-covalent bonds. In some embodiments, the linker is a peptide linker. Such a linker may be between 2-30 amino acids, or longer. The linker includes flexible, rigid or cleavable linkers.

### Combinations

[0517] In one aspect, the synthetic curon or composition comprising a synthetic curon described herein may also include one or more heterologous moiety. In one aspect, the curon or composition comprising a synthetic curon described herein may also include one or more heterologous moiety in a fusion. In some embodiments, a heterologous moiety may be linked with the genetic element. In some embodiments, a heterologous moiety may be enclosed in the proteinaceous exterior as part of the curon. In some embodiments, a heterologous moiety may be administered with the synthetic curon.

[0518] In one aspect, the invention includes a cell or tissue comprising any one of the synthetic curons and heterologous moieties described herein.

[0519] In another aspect, the invention includes a pharmaceutical composition comprising a synthetic curon and the heterologous moiety described herein.

[0520] In some embodiments, the heterologous moiety may be a virus (e.g., an effector (e.g., a drug, small molecule), a targeting agent (e.g., a DNA targeting agent, antibody, receptor ligand), a tag (e.g., fluorophore, light sensitive agent such as KillerRed), or an editing or targeting moiety described herein. In some embodiments, a membrane translocating polypeptide described herein is linked to one or more heterologous moieties. In one embodiment, the heterologous moiety is a small molecule (e.g., a peptidomimetic or a small organic molecule with a molecular weight of less than 2000 daltons), a peptide or polypeptide (e.g., an antibody or antigen-binding fragment thereof), a nanoparticle, an aptamer, or pharmacoagent.

[0521] Viruses

[0522] In some embodiments, the composition may further comprise a virus as a heterologous moiety, e.g., a single stranded DNA virus, e.g., Anellovirus, Bidnavirus, Circovirus, Geminivirus, Genomovirus, Inovirus, Microvirus, Nanovirus, Parvovirus, and Spiravirus. In some embodiments, the composition may further comprise a double stranded DNA virus, e.g., Adenovirus, Ampullavirus, Ascovirus, Asfarvirus, Baculovirus, Fusellovirus, Globulovirus, Guttavirus, Hytrosavirus, Herpesvirus, Iridovirus, Lipothrixvirus, Nimavirus, and Poxvirus. In some embodiments, the composition may further comprise an RNA virus, e.g., Alphavirus, Furovirus, Hepatitis virus, Hordeivirus, Tobamovirus, Tobravirus, Tricornavirus, Rubivirus, Birnavirus, Cystovirus, Partitivirus, and Reovirus. In some embodiments, the curon is administered with a virus as a heterologous moiety.

[0523] In some embodiments, the heterologous moiety may comprise a non-pathogenic, e.g., symbiotic, commensal, native, virus. In some embodiments, the non-pathogenic virus is one or more anelloviruses, e.g., Alphatorquevirus (TT), Betatorquevirus (TTM), and Gammatorquevirus (TTMD). In some embodiments, the anellovirus may include a Torque Teno Virus (TT), a SEN virus, a Sentinel virus, a TTV-like mini virus, a TT virus, a TT virus genotype 6, a TT virus group, a TTV-like virus DXL1, a TTV-like virus DXL2, a Torque Teno-like Mini Virus (TTM), or a Torque Teno-like Midi Virus (TTMD). In some embodiments, the non-pathogenic virus comprises one or more sequences having at least at least about 60%, 70% 80%, 85%, 90% 95%, 96%, 97%, 98% and 99% nucleotide sequence identity to any one of the nucleotide sequences described herein, e.g., Table 19 or Table 20.

[0524] In some embodiments, the heterologous moiety may comprise one or more viruses that are identified as lacking in the subject. For example, a subject identified as having dyvirosis may be administered a composition comprising a curon and one or more viral components or viruses that are imbalanced in the subject or having a ratio that differs from a reference value, e.g., a healthy subject.

[0525] In some embodiments, the heterologous moiety may comprise one or more non-anelloviruses, e.g., adenovirus, herpes virus, pox virus, vaccinia virus, SV40, papilloma virus, an RNA virus such as a retrovirus, e.g., lenti virus, a single-stranded RNA virus, e.g., hepatitis virus, or a double-stranded RNA virus e.g., rotavirus. In some embodiments, the curon or the virus is defective, or requires assistance in order to produce infectious particles. Such assistance can be provided, e.g., by using helper cell lines that contain a nucleic acid, e.g., plasmids or DNA integrated into the genome, encoding one or more of (e.g., all of) the structural genes of the replication defective curon or virus under the control of regulatory sequences within the LTR. Suitable cell lines for replicating the curons described herein include cell lines known in the art, e.g., A549 cells, which can be modified as described herein.

[0526] Effector

[0527] In some embodiments, the composition or synthetic curon may further comprise an effector that possesses effector activity. The effector may modulate a biological activity, for example increasing or decreasing enzymatic activity, gene expression, cell signaling, and cellular or organ function. Effector activities may also include binding regulatory proteins to modulate activity of the regulator, such as transcription or translation. Effector activities also may include activator or inhibitor functions. For example, the effector may induce enzymatic activity by triggering increased substrate affinity in an enzyme, e.g., fructose 2,6-bisphosphate activates phosphofructokinase 1 and increases the rate of glycolysis in response to the insulin. In another example, the effector may inhibit substrate binding to a receptor and inhibit its activation, e.g., naltrexone and naloxone bind opioid receptors without activating them and block the receptors' ability to bind opioids. Effector activities may also include modulating protein stability/degradation and/or transcript stability/degradation. For example, proteins may be targeted for degradation by the polypeptide co-factor, ubiquitin, onto proteins to mark them for degradation. In another example, the effector inhibits enzymatic activity by blocking the enzyme's active site, e.g., methotrexate is a structural analog of tetrahydrofolate, a coenzyme for the enzyme dihydrofolate reductase that binds to dihydrofolate reductase 1000-fold more tightly than the natural substrate and inhibits nucleotide base synthesis.

[0528] Targeting Moiety

[0529] In some embodiments, the composition or curon described herein may further comprise a targeting moiety, e.g., a targeting moiety that specifically binds to a molecule of interest present on a target cell. The targeting moiety may modulate a specific function of the molecule of interest or cell, modulate a specific molecule (e.g., enzyme, protein or nucleic acid), e.g., a specific molecule downstream of the molecule of interest in a pathway, or specifically bind to a target to localize the curon or genetic element. For example, a targeting moiety may include a therapeutic that interacts with a specific molecule of interest to increase, decrease or otherwise modulate its function.

[0530] Tagging or Monitoring Moiety

[0531] In some embodiments, the composition or synthetic curon described herein may further comprise a tag to label or monitor the curon or genetic element described herein. The tagging or monitoring moiety may be removable by chemical agents or enzymatic cleavage, such as proteolysis or intein splicing. An affinity tag may be useful to purify the tagged polypeptide using an affinity technique. Some examples include, chitin binding protein (CBP), maltose binding protein (MBP), glutathione-S-transferase (GST), and poly(His) tag. A solubilization tag may be useful to aid recombinant proteins expressed in chaperone-deficient species such as E. coli to assist in the proper folding in proteins and keep them from precipitating. Some examples include thioredoxin (TRX) and poly(NANP). The tagging or monitoring moiety may include a light sensitive tag, e.g., fluorescence. Fluorescent tags are useful for visualization. GFP and its variants are some examples commonly used as fluorescent tags. Protein tags may allow specific enzymatic modifications (such as biotinylation by biotin ligase) or chemical modifications (such as reaction with FlAsH-EDT2 for fluorescence imaging) to occur. Often tagging or monitoring moiety are combined, in order to connect proteins to multiple other components. The tagging or monitoring moiety may also be removed by specific proteolysis or enzymatic cleavage (e.g. by TEV protease, Thrombin, Factor Xa or Enteropeptidase).

[0532] Nanoparticles

[0533] In some embodiments, the composition or synthetic curon described herein may further comprise a nanoparticle. Nanoparticles include inorganic materials with a size between about 1 and about 1000 nanometers, between about 1 and about 500 nanometers in size, between about 1 and about 100 nm, between about 50 nm and about 300 nm, between about 75 nm and about 200 nm, between about 100 nm and about 200 nm, and any range therebetween. Nanoparticles generally have a composite structure of nanoscale dimensions. In some embodiments, nanoparticles are typically spherical although different morphologies are possible depending on the nanoparticle composition. The portion of the nanoparticle contacting an environment external to the nanoparticle is generally identified as the surface of the nanoparticle. In nanoparticles described herein, the size limitation can be restricted to two dimensions and so that nanoparticles include composite structure having a diameter from about 1 to about 1000 nm, where the specific diameter depends on the nanoparticle composition and on the intended use of the nanoparticle according to the experimental design. For example, nanoparticles used in therapeutic applications typically have a size of about 200 nm or below.

[0534] Additional desirable properties of the nanoparticle, such as surface charges and steric stabilization, can also vary in view of the specific application of interest. Exemplary properties that can be desirable in clinical applications such as cancer treatment are described in Davis et al, Nature 2008 vol. 7, pages 771-782; Duncan, Nature 2006 vol. 6, pages 688-701; and Allen, Nature 2002 vol. 2 pages 750-763, each incorporated herein by reference in its entirety. Additional properties are identifiable by a skilled person upon reading of the present disclosure. Nanoparticle dimensions and properties can be detected by techniques known in the art. Exemplary techniques to detect particles dimensions include but are not limited to dynamic light scattering (DLS) and a variety of microscopies such at transmission electron microscopy (TEM) and atomic force microscopy (AFM). Exemplary techniques to detect particle morphology include but are not limited to TEM and AFM. Exemplary techniques to detect surface charges of the nanoparticle include but are not limited to zeta potential method. Additional techniques suitable to detect other chemical properties comprise by ¹H, ¹¹B, and ¹³C and ¹⁹F NMR, UV/Vis and infrared/Raman spectroscopies and fluorescence spectroscopy (when nanoparticle is used in combination with fluorescent labels) and additional techniques identifiable by a skilled person.

[0535] Small Molecules

[0536] In some embodiments, the composition or synthetic curon described herein may further comprise a small molecule. Small molecule moieties include, but are not limited to, small peptides, peptidomimetics (e.g., peptoids), amino acids, amino acid analogs, synthetic polynucleotides, polynucleotide analogs, nucleotides, nucleotide analogs, organic and inorganic compounds (including heterorganic and organomettallic compounds) generally having a molecular weight less than about 5,000 grams per mole, e.g., organic or inorganic compounds having a molecular weight less than about 2,000 grams per mole, e.g., organic or inorganic compounds having a molecular weight less than about 1,000 grams per mole, e.g., organic or inorganic compounds having a molecular weight less than about 500 grams per mole, and salts, esters, and other pharmaceutically acceptable forms of such compounds. Small molecules may include, but are not limited to, a neurotransmitter, a hormone, a drug, a toxin, a viral or microbial particle, a synthetic molecule, and agonists or antagonists.

[0537] Examples of suitable small molecules include those described in, “The Pharmacological Basis of Therapeutics,” Goodman and Gilman, McGraw-Hill, New York, N.Y., (1996), Ninth edition, under the sections: Drugs Acting at Synaptic and Neuroeffector Junctional Sites; Drugs Acting on the Central Nervous System; Autacoids: Drug Therapy of Inflammation; Water, Salts and Ions; Drugs Affecting Renal Function and Electrolyte Metabolism; Cardiovascular Drugs; Drugs Affecting Gastrointestinal Function; Drugs Affecting Uterine Motility; Chemotherapy of Parasitic Infections; Chemotherapy of Microbial Diseases; Chemotherapy of Neoplastic Diseases; Drugs Used for Immunosuppression; Drugs Acting on Blood-Forming organs; Hormones and Hormone Antagonists; Vitamins, Dermatology; and Toxicology, all incorporated herein by reference. Some examples of small molecules include, but are not limited to, prion drugs such as tacrolimus, ubiquitin ligase or HECT ligase inhibitors such as heclin, histone modifying drugs such as sodium butyrate, enzymatic inhibitors such as 5-aza-cytidine, anthracyclines such as doxorubicin, beta-lactams such as penicillin, anti-bacterials, chemotherapy agents, anti-virals, modulators from other organisms such as VP64, and drugs with insufficient bioavailability such as chemotherapeutics with deficient pharmacokinetics.

[0538] In some embodiments, the small molecule is an epigenetic modifying agent, for example such as those described in de Groote et al. Nuc. Acids Res. (2012):1-18. Exemplary small molecule epigenetic modifying agents are described, e.g., in Lu et al. J. Biomolecular Screening 17.5(2012):555-71, e.g., at Table 1 or 2, incorporated herein by reference. In some embodiments, an epigenetic modifying agent comprises vornostat or romidepsin. In some embodiments, an epigenetic modifying agent comprises an inhibitor of class I, II, III, and/or IV histone deacetylase (HDAC). In some embodiments, an epigenetic modifying agent comprises an activator of SirTI. In some embodiments, an epigenetic modifying agent comprises Garcinol, Lys-CoA, C646, (+)-JQI, I-BET, BICI, MS120, DZNep, UNC0321, EPZ004777, AZ505, AMI-I, pyrazole amide 7b, benzo[d]imidazole 17b, acylated dapsone derivative (e.e.g, PRMTI), methylstat, 4,4′-dicarboxy-2,2′-bipyridine, SID 85736331, hydroxamate analog 8, tanylcypromie, bisguanidine and biguanide polyamine analogs, UNC669, Vidaza, decitabine, sodium phenyl butyrate (SDB), lipoic acid (LA), quercetin, valproic acid, hydralazine, bactrim, green tea extract (e.g., epigallocatechin gallate (EGCG)), curcumin, sulforphane and/or allicin/diallyl disulfide. In some embodiments, an epigenetic modifying agent inhibits DNA methylation, e.g., is an inhibitor of DNA methyltransferase (e.g., is 5-azacitidine and/or decitabine). In some embodiments, an epigenetic modifying agent modifies histone modification, e.g., histone acetylation, histone methylation, histone sumoylation, and/or histone phosphorylation. In some embodiments, the epigenetic modifying agent is an inhibitor of a histone deacetylase (e.g., is vorinostat and/or trichostatin A).

[0539] In some embodiments, the small molecule is a pharmaceutically active agent. In one embodiment, the small molecule is an inhibitor of a metabolic activity or component. Useful classes of pharmaceutically active agents include, but are not limited to, antibiotics, anti-inflammatory drugs, angiogenic or vasoactive agents, growth factors and chemotherapeutic (anti-neoplastic) agents (e.g., tumour suppressers). One or a combination of molecules from the categories and examples described herein or from (Orme-Johnson 2007, Methods Cell Biol. 2007; 80:813-26) can be used. In one embodiment, the invention includes a composition comprising an antibiotic, anti-inflammatory drug, angiogenic or vasoactive agent, growth factor or chemotherapeutic agent.

[0540] Peptides or Proteins

[0541] In some embodiments, the composition or synthetic curon described herein may further comprise a peptide or protein. The peptide moieties may include, but are not limited to, a peptide ligand or antibody fragment (e.g., antibody fragment that binds a receptor such as an extracellular receptor), neuropeptide, hormone peptide, peptide drug, toxic peptide, viral or microbial peptide, synthetic peptide, and agonist or antagonist peptide.

[0542] Peptides moieties may be linear or branched. The peptide has a length from about 5 to about 200 amino acids, about 15 to about 150 amino acids, about 20 to about 125 amino acids, about 25 to about 100 amino acids, or any range therebetween.

[0543] Some examples of peptides include, but are not limited to, fluorescent tags or markers, antigens, antibodies, antibody fragments such as single domain antibodies, ligands and receptors such as glucagon-like peptide-1 (GLP-1), GLP-2 receptor 2, cholecystokinin B (CCKB) and somatostatin receptor, peptide therapeutics such as those that bind to specific cell surface receptors such as G protein-coupled receptors (GPCRs) or ion channels, synthetic or analog peptides from naturally-bioactive peptides, anti-microbial peptides, pore-forming peptides, tumor targeting or cytotoxic peptides, and degradation or self-destruction peptides such as an apoptosis-inducing peptide signal or photosensitizer peptide.

[0544] Peptides useful in the invention described herein also include small antigen-binding peptides, e.g., antigen binding antibody or antibody-like fragments, such as single chain antibodies, nanobodies (see, e.g., Steeland et al. 2016. Nanobodies as therapeutics: big opportunities for small antibodies. Drug Discov Today: 21(7):1076-113). Such small antigen binding peptides may bind a cytosolic antigen, a nuclear antigen, an intra-organellar antigen.

[0545] In some embodiments, the composition or curon described herein includes a polypeptide linked to a ligand that is capable of targeting a specific location, tissue, or cell.

[0546] Oligonucleotide Aptamers

[0547] In some embodiments, the composition or synthetic curon described herein may further comprise an oligonucleotide aptamer. Aptamer moieties are oligonucleotide or peptide aptamers. Oligonucleotide aptamers are single-stranded DNA or RNA (ssDNA or ssRNA) molecules that can bind to pre-selected targets including proteins and peptides with high affinity and specificity.

[0548] Oligonucleotide aptamers are nucleic acid species that may be engineered through repeated rounds of in vitro selection or equivalently, SELEX (systematic evolution of ligands by exponential enrichment) to bind to various molecular targets such as small molecules, proteins, nucleic acids, and even cells, tissues and organisms. Aptamers provide discriminate molecular recognition, and can be produced by chemical synthesis. In addition, aptamers may possess desirable storage properties, and elicit little or no immunogenicity in therapeutic applications.

[0549] Both DNA and RNA aptamers can show robust binding affinities for various targets. For example, DNA and RNA aptamers have been selected for t lysozyme, thrombin, human immunodeficiency virus trans-acting responsive element (HIV TAR), (see en.wikipedia.org/wiki/Aptamer—cite_note-10), hemin, interferon γ, vascular endothelial growth factor (VEGF), prostate specific antigen (PSA), dopamine, and the non-classical oncogene, heat shock factor 1 (HSF1).

[0550] Peptide Aptamers

[0551] In some embodiments, the composition or synthetic curon described herein may further comprise a peptide aptamer. Peptide aptamers have one (or more) short variable peptide domains, including peptides having low molecular weight, 12-14 kDa. Peptide aptamers may be designed to specifically bind to and interfere with protein-protein interactions inside cells.

[0552] Peptide aptamers are artificial proteins selected or engineered to bind specific target molecules. These proteins include of one or more peptide loops of variable sequence. They are typically isolated from combinatorial libraries and often subsequently improved by directed mutation or rounds of variable region mutagenesis and selection. In vivo, peptide aptamers can bind cellular protein targets and exert biological effects, including interference with the normal protein interactions of their targeted molecules with other proteins. In particular, a variable peptide aptamer loop attached to a transcription factor binding domain is screened against the target protein attached to a transcription factor activating domain. In vivo binding of the peptide aptamer to its target via this selection strategy is detected as expression of a downstream yeast marker gene. Such experiments identify particular proteins bound by the aptamers, and protein interactions that the aptamers disrupt, to cause the phenotype. In addition, peptide aptamers derivatized with appropriate functional moieties can cause specific post-translational modification of their target proteins, or change the subcellular localization of the targets

[0553] Peptide aptamers can also recognize targets in vitro. They have found use in lieu of antibodies in biosensors and used to detect active isoforms of proteins from populations containing both inactive and active protein forms. Derivatives known as tadpoles, in which peptide aptamer “heads” are covalently linked to unique sequence double-stranded DNA “tails”, allow quantification of scarce target molecules in mixtures by PCR (using, for example, the quantitative real-time polymerase chain reaction) of their DNA tails.

[0554] Peptide aptamer selection can be made using different systems, but the most used is currently the yeast two-hybrid system. Peptide aptamers can also be selected from combinatorial peptide libraries constructed by phage display and other surface display technologies such as mRNA display, ribosome display, bacterial display and yeast display. These experimental procedures are also known as biopannings. Among peptides obtained from biopannings, mimotopes can be considered as a kind of peptide aptamers. All the peptides panned from combinatorial peptide libraries have been stored in a special database with the name MimoDB.

### Hosts

[0555] The invention is further directed to a host or host cell comprising a synthetic curon described herein. In some embodiments, the host or host cell is a plant, insect, bacteria, fungus, vertebrate, mammal (e.g., human), or other organism or cell. In certain embodiments, as confirmed herein, provided curons infect a range of different host cells. Target host cells include cells of mesodermal, endodermal, or ectodermal origin. Target host cells include, e.g., epithelial cells, muscle cells, white blood cells (e.g., lymphocytes), kidney tissue cells, lung tissue cells.

[0556] In some embodiments, the curon is substantially non-immunogenic in the host. The curon or genetic element fails to produce an undesired substantial response by the host's immune system. Some immune responses include, but are not limited to, humoral immune responses (e.g., production of antigen-specific antibodies) and cell-mediated immune responses (e.g., lymphocyte proliferation).

[0557] In some embodiments, a host or a host cell is contacted with (e.g., infected with) a synthetic curon. In some embodiments, the host is a mammal, such as a human. The amount of the curon in the host can be measured at any time after administration. In certain embodiments, a time course of curon growth in a culture is determined.

[0558] In some embodiments, the curon, e.g., a curon as described herein, is heritable. In some embodiments, the curon is transmitted linearly in fluids and/or cells from mother to child. In some embodiments, daughter cells from an original host cell comprise the curon. In some embodiments, a mother transmits the curon to child with an efficiency of at least 25%, 50%, 60%, 70%, 80%, 85%, 90%, 95%, or 99%, or a transmission efficiency from host cell to daughter cell at least 25%, 50%, 60%, 70%, 80%, 85%, 90%, 95%, or 99%. In some embodiments, the curon in a host cell has a transmission efficiency during meiosis of at 25%, 50%, 60%, 70%, 80%, 85%, 90%, 95%, or 99%. In some embodiments, the curon in a host cell has a transmission efficiency during mitosis of at least 25%, 50%, 60%, 70%, 80%, 85%, 90%, 95%, or 99%. In some embodiments, the curon in a cell has a transmission efficiency between about 10%-20%, 20%-30%, 30%-40%, 40%-50%, 50%-60%, 60%-70%, 70%-75%, 75%-80%, 80%-85%, 85%-90%, 90%-95%, 95%-99%, or any percentage therebetween.

[0559] In some embodiments, the curon, e.g., synthetic curon replicates within the host cell. In one embodiment, the synthetic curon is capable of replicating in a mammalian cell, e.g., human cell.

[0560] While in some embodiments the synthetic curon replicates in the host cell, the synthetic curon does not integrate into the genome of the host, e.g., with the host's chromosomes. In some embodiments, the synthetic curon has a negligible recombination frequency, e.g., with the host's chromosomes. In some embodiments, the curon has a recombination frequency, e.g., less than about 1.0 cM/Mb, 0.9 cM/Mb, 0.8 cM/Mb, 0.7 cM/Mb, 0.6 cM/Mb, 0.5 cM/Mb, 0.4 cM/Mb, 0.3 cM/Mb, 0.2 cM/Mb, 0.1 cM/Mb, or less, e.g., with the host's chromosomes.

### Methods of Use

[0561] The synthetic curons and compositions comprising synthetic curons described herein may be used in methods of treating a disease, disorder, or condition, e.g., in a subject (e.g., a mammalian subject, e.g., a human subject) in need thereof. Administration of a pharmaceutical composition described herein may be, for example, by way of parenteral (including intravenous, intratumoral, intraperitoneal, intramuscular, intracavity, and subcutaneous) administration. The synthetic curons may be administered alone or formulated as a pharmaceutical composition.

[0562] The synthetic curons may be administered in the form of a unit-dose composition, such as a unit dose parenteral composition. Such compositions are generally prepared by admixture and can be suitably adapted for parenteral administration. Such compositions may be, for example, in the form of injectable and infusable solutions or suspensions or suppositories or aerosols.

[0563] In some embodiments, administration of a synthetic curon or composition comprising same, e.g., as described herein, may result in delivery of a genetic element comprised by the synthetic curon to a target cell, e.g., in a subject.

[0564] A synthetic curon or composition thereof described herein, e.g., comprising an exogenous effector or payload, may be used to deliver the exogenous effector or payload to a cell, tissue, or subject. In some embodiments, the synthetic curon or composition thereof is used to deliver the exogenous effector or payload to bone marrow, blood, heart, GI or skin. Delivery of an exogenous effector or payload by administration of a synthetic curon composition described herein may modulate (e.g., increase or decrease) expression levels of a noncoding RNA or polypeptide in the cell, tissue, or subject. Modulation of expression level in this fashion may result in alteration of a functional activity in the cell to which the exogenous effector or payload is delivered. In some embodiments, the modulated functional activity may be enzymatic, structural, or regulatory in nature.

[0565] In some embodiments, the synthetic curon, or copies thereof, are detectable in a cell 24 hours (e.g., 1 day, 2 days, 3 days, 4 days, 5 days, 6 days, 1 week, 2 weeks, 3 weeks, 4 weeks, 30 days, or 1 month) after delivery into a cell. In embodiments, a synthetic curon or composition thereof mediates an effect on a target cell, and the effect lasts for at least 1, 2, 3, 4, 5, 6, or 7 days, 2, 3, or 4 weeks, or 1, 2, 3, 6, or 12 months. In some embodiments (e.g., wherein the synthetic curon or composition thereof comprises a genetic element encoding an exogenous protein), the effect lasts for less than 1, 2, 3, 4, 5, 6, or 7 days, 2, 3, or 4 weeks, or 1, 2, 3, 6, or 12 months.

[0566] Examples of diseases, disorders, and conditions that can be treated with the synthetic curon described herein, or a composition comprising the synthetic curon, include, without limitation: immune disorders, interferonopathies (e.g., Type I interferonopathies), infectious diseases, inflammatory disorders, autoimmune conditions, cancer (e.g., a solid tumor, e.g., lung cancer, non-small cell lung cancer, e.g., a tumor that expresses a gene responsive to mIR-625, e.g., caspase-3), and gastrointestinal disorders. In some embodiments, the synthetic curon modulates (e.g., increases or decreases) an activity or function in a cell with which the curon is contacted. In some embodiments, the synthetic curon modulates (e.g., increases or decreases) the level or activity of a molecule (e.g., a nucleic acid or a protein) in a cell with which the curon is contacted. In some embodiments, the synthetic curon decreases viability of a cell, e.g., a cancer cell, with which the curon is contacted, e.g., by at least about 10%, 20%, 30%, 40%, 50%, 60%, 70%, 80%, 90%, 95%, 99%, or more. In some embodiments, the synthetic curon comprises an effector, e.g., an miRNA, e.g., miR-625, that decreases viability of a cell, e.g., a cancer cell, with which the curon is contacted, e.g., by at least about 10%, 20%, 30%, 40%, 50%, 60%, 70%, 80%, 90%, 95%, 99%, or more. In some embodiments, the synthetic curon increases apoptosis of a cell, e.g., a cancer cell, e.g., by increasing caspase-3 activity, with which the curon is contacted, e.g., by at least about 10%, 20%, 30%, 40%, 50%, 60%, 70%, 80%, 90%, 95%, 99%, or more. In some embodiments, the synthetic curon comprises an effector, e.g., an miRNA, e.g., miR-625, that increases apoptosis of a cell, e.g., a cancer cell, e.g., by increasing caspase-3 activity, with which the curon is contacted, e.g., by at least about 10%, 20%, 30%, 40%, 50%, 60%, 70%, 80%, 90%, 95%, 99%, or more.

### Additional Curon Embodiments

[0567] In one aspect, the invention includes a synthetic curon comprising: a genetic element comprising (i) a sequence encoding a non-pathogenic exterior protein, (ii) an exterior protein binding sequence that binds the genetic element to the non-pathogenic exterior protein, and (iii) a sequence encoding an effector, e.g., a regulatory nucleic acid; and a proteinaceous exterior that is associated with, e.g., envelops or encloses, the genetic element.

[0568] In one aspect, the invention includes a pharmaceutical composition comprising: a) a curon comprising: a genetic element comprising (i) a sequence encoding a non-pathogenic exterior protein, (ii) an exterior protein binding sequence that binds the genetic element to the non-pathogenic exterior protein, and (iii) a sequence encoding an effector, e.g., a regulatory nucleic acid; and a proteinaceous exterior that is associated with, e.g., envelops or encloses, the genetic element; and b) a pharmaceutical excipient.

[0569] In various aspects of the invention delineated herein, one or more of the various embodiments described herein may be combined.

[0570] In some embodiments, curon or composition described herein further comprises at least one of the following characteristics: the genetic element is a single-stranded DNA; the genetic element is circular; the curon is non-integrating; the curon has a sequence, structure, and/or function based on an anellovirus or other non-pathogenic virus, and the curon is non-pathogenic.

[0571] In some embodiments, the proteinaceous exterior comprises the non-pathogenic exterior protein. In some embodiments, the proteinaceous exterior comprises one or more of the following: one or more glycosylated proteins, a hydrophilic DNA-binding region, an arginine-rich region, a threonine-rich region, a glutamine-rich region, a N-terminal polyarginine sequence, a variable region, a C-terminal polyglutamine/glutamate sequence, and one or more disulfide bridges. In some embodiments, the proteinaceous exterior comprises one or more of the following characteristics: an icosahedral symmetry, recognizes and/or binds a molecule that interacts with one or more host cell molecules to mediate entry into the host cell, lacks lipid molecules, lacks carbohydrates, is pH and temperature stable, is detergent resistant, and is non-immunogenic or non-pathogenic in a host. For example, data provided herein confirm that provided curons are infectious.

[0572] In some embodiments, the sequence encoding the non-pathogenic exterior protein comprise a sequence at least 70%, 80%, 85%, 90%, 95%, 96%, 97%, 98%, 99% identical to one or more sequences or a fragment thereof listed in Table 15. In some embodiments, the non-pathogenic exterior protein comprises a sequence at least 70%, 80%, 85%, 90%, 95%, 96%, 97%, 98%, 99% identical to one or more sequences or a fragment thereof listed in Table 16 or Table 17. In some embodiments, the non-pathogenic exterior protein comprises at least one functional domain that provides one or more functions, e.g., species and/or tissue and/or cell tropism, viral genome binding and/or packaging, immune evasion (non-immunogenicity and/or tolerance), pharmacokinetics, endocytosis and/or cell attachment, nuclear entry, intracellular modulation and localization, exocytosis modulation, propagation, and nucleic acid protection.

[0573] In some embodiments, the effector comprises a regulatory nucleic acid, e.g., an miRNA, siRNA, mRNA, lncRNA, RNA, DNA, an antisense RNA, gRNA; a therapeutic, e.g., fluorescent tag or marker, antigen, peptide therapeutic, synthetic or analog peptide from naturally-bioactive peptide, agonist or antagonist peptide, anti-microbial peptide, pore-forming peptide, a bicyclic peptide, a targeting or cytotoxic peptide, a degradation or self-destruction peptide, and degradation or self-destruction peptides, small molecule, immune effector (e.g., influences susceptibility to an immune response/signal), a death protein (e.g., an inducer of apoptosis or necrosis), a non-lytic inhibitor of a tumor (e.g., an inhibitor of an oncoprotein), an epigenetic modifying agent, epigenetic enzyme, a transcription factor, a DNA or protein modification enzyme, a DNA-intercalating agent, an efflux pump inhibitor, a nuclear receptor activator or inhibitor, a proteasome inhibitor, a competitive inhibitor for an enzyme, a protein synthesis effector or inhibitor, a nuclease, a protein fragment or domain, a ligand or a receptor, and a CRISPR system or component. In some embodiments, the effector comprises a sequence at least 70%, 80%, 85%, 90%, 95%, 96%, 97%, 98%, 99% identical to one or more miRNA sequences listed in Table 18. In some embodiments, the effector, e.g., miRNA, targets a host gene, e.g., modulates expression of the gene.

[0574] In some embodiments, the genetic element further comprises one or more of the following sequences: a sequence that encodes one or more miRNAs, a sequence that encodes one or more replication proteins, a sequence that encodes an exogenous gene, a sequence that encodes a therapeutic, a regulatory sequence (e.g., a promoter, enhancer), a sequence that encodes one or more regulatory sequences that targets endogenous genes (siRNA, lncRNAs, shRNA), a sequence that encodes a therapeutic mRNA or protein, and a sequence that encodes a cytolytic/cytotoxic RNA or protein. In some embodiments, the genetic element has one or more of the following characteristics: is non-integrating with a host cell's genome, is an episomal nucleic acid, is a single stranded DNA, is about 1 to 10 kb, exists within the nucleus of the cell, is capable of being bound by endogenous proteins, and produces a microRNA that targets host genes.

[0575] In some embodiments, the genetic element comprises at least one viral sequence or at least 70%, 80%, 85%, 90%, 95%, 96%, 97%, 98%, 99% identity to one or more sequences or a fragment thereof listed in Table 19 or Table 20. In one such embodiment, the viral sequence is from at least one of a single stranded DNA virus (e.g., Anellovirus, Bidnavirus, Circovirus, Geminivirus, Genomovirus, Inovirus, Microvirus, Nanovirus, Parvovirus, and Spiravirus), a double stranded DNA virus (e.g., Adenovirus, Ampullavirus, Ascovirus, Asfarvirus, Baculovirus, Fusellovirus, Globulovirus, Guttavirus, Hytrosavirus, Herpesvirus, Iridovirus, Lipothrixvirus, Nimavirus, and Poxvirus), a RNA virus (e.g., Alphavirus, Furovirus, Hepatitis virus, Hordeivirus, Tobamovirus, Tobravirus, Tricornavirus, Rubivirus, Birnavirus, Cystovirus, Partitivirus, and Reovirus). In another embodiment, the viral sequence is from one or more non-anelloviruses, e.g., adenovirus, herpes virus, pox virus, vaccinia virus, SV40, papilloma virus, an RNA virus such as a retrovirus, e.g., lenti virus, a single-stranded RNA virus, e.g., hepatitis virus, or a double-stranded RNA virus e.g., rotavirus.

[0576] In some embodiments, the protein binding sequence interacts with the arginine-rich region of the proteinaceous exterior.

[0577] In some embodiments, the curon is capable of replicating in a mammalian cell, e.g., human cell. In some embodiments, the curon is substantially non-pathogenic and/or non-integrating in a host cell. In some embodiments, the curon is substantially non-immunogenic in a host. In some embodiments, the curon inhibits/enhances one or more viral properties, e.g., tropism, e.g., infectivity, e.g., immunosuppression/activation, in a host or host cell. In some embodiments, the curon is in an amount sufficient to modulate (e.g., phenotype, virus levels, gene expression, compete with other viruses, disease state, etc. at least about 5%, 10%, 15%, 20%, 25%, 30%, 35%, 40%, 45%, 50%, or more).

[0578] In some embodiments, the composition further comprises at least one virus or vector comprising a genome of the virus, e.g., a variant of the curon, e.g., a commensal/native virus. In some embodiments, the composition further comprises a heterologous moiety, e.g., at least one small molecule, antibody, polypeptide, nucleic acid, targeting agent, imaging agent, nanoparticle, and a combination thereof.

[0579] In one aspect, the invention includes a vector comprising a genetic element comprising (i) a sequence encoding a non-pathogenic exterior protein, (ii) an exterior protein binding sequence that binds the genetic element to the non-pathogenic exterior protein, and (iii) a sequence encoding an effector, e.g., a regulatory nucleic acid.

[0580] In various aspects of the invention delineated herein, one or more of the various embodiments described herein may be combined.

[0581] In some embodiments, the genetic element fails to integrate with a host cell's genome. In some embodiments, the genetic element is capable of replicating in a mammalian cell, e.g., human cell.

[0582] In some embodiments, the vector further comprises an exogenous nucleic acid sequence, e.g., selected to modulate expression of a gene, e.g., a human gene.

[0583] In one aspect, the invention includes a pharmaceutical composition comprising the vector described herein and a pharmaceutical excipient.

[0584] In various aspects of the invention delineated herein, one or more of the various embodiments described herein may be combined.

[0585] In some embodiments, the vector is substantially non-pathogenic and/or non-integrating in a host cell. In some embodiments, the vector is substantially non-immunogenic in a host.

[0586] In some embodiments, the vector is in an amount sufficient to modulate (phenotype, virus levels, gene expression, compete with other viruses, disease state, etc. at least about 5%, 10%, 15%, 20%, 25%, 30%, 35%, 40%, 45%, 50%, or more).

[0587] In some embodiments, the composition further comprises at least one virus or vector comprising a genome of the virus, e.g., a variant of the curon, a commensal/native virus, a helper virus, a non-anellovirus. In some embodiments, the composition further comprises a heterologous moiety, at least one small molecule, antibody, polypeptide, nucleic acid, targeting agent, imaging agent, nanoparticle, and a combination thereof.

[0588] In one aspect, the invention includes a method of producing, propagating, and harvesting the curon described herein.

[0589] In one aspect, the invention includes a method of designing and making the vector described herein.

[0590] In one aspect, the invention includes a method of identifying dysvirosis in a subject comprising: analyzing genetic information from a sample obtained from a subject in need thereof, wherein viral genetic information is isolated from the subject's genetic information and other microorganisms; comparing the viral genetic information to a reference, e.g., a control, a healthy subject; and identifying dysvirosis in the subject if comparison of the viral genetic information yields an imbalance or irregular ratio of viral genetic information in the subject.

[0591] In various aspects of the invention delineated herein, one or more of the various embodiments described herein may be combined.

[0592] In some embodiments, the subject is administered the pharmaceutical composition further comprising one or more viral strains that are not represented in the viral genetic information. In some embodiments, the subject has inflammatory condition or disorder, autoimmune condition or disease, chronic/acute condition or disorder, cancer, gastrointestinal condition or disorder, or any combination thereof.

[0593] In embodiments, the synthetic curon inhibits interferon expression.

### Methods of Production

### Producing the Genetic Element

[0594] Methods of making the genetic element of the curon are described in, for example, Khudyakov & Fields, Artificial DNA: Methods and Applications, CRC Press (2002); in Zhao, Synthetic Biology: Tools and Applications, (First Edition), Academic Press (2013); and Egli & Herdewijn, Chemistry and Biology of Artificial Nucleic Acids, (First Edition), Wiley-VCH (2012).

[0595] In some embodiments, the genetic element may be designed using computer-aided design tools. The curon may be divided into smaller overlapping pieces (e.g., in the range of about 100 bp to about 10 kb segments or individual ORFs) that are easier to synthesize. These DNA segments are synthesized from a set of overlapping single-stranded oligonucleotides. The resulting overlapping synthons are then assembled into larger pieces of DNA, e.g., the curon. The segments or ORFs may be assembled into the curon, e.g., in vitro recombination or unique restriction sites at 5′ and 3′ ends to enable ligation.

[0596] The genetic element can alternatively be synthesized with a design algorithm that parses the curon into oligo-length fragments, creating optimal design conditions for synthesis that take into account the complexity of the sequence space. Oligos are then chemically synthesized on semiconductor-based, high-density chips, where over 200,000 individual oligos are synthesized per chip. The oligos are assembled with an assembly techniques, such as BioFab®, to build longer DNA segments from the smaller oligos. This is done in a parallel fashion, so hundreds to thousands of synthetic DNA segments are built at one time.

[0597] Each genetic element or segment of the genetic element may be sequence verified. In some embodiments, high-throughput sequencing of RNA or DNA can take place using AnyDot.chips (Genovoxx, Germany), which allows for the monitoring of biological processes (e.g., miRNA expression or allele variability (SNP detection). In particular, the AnyDot-chips allow for 10×-50× enhancement of nucleotide fluorescence signal detection. AnyDot.chips and methods for using them are described in part in International Publication Application Nos. WO 02088382, WO 03020968, WO 0303 1947, WO 2005044836, PCTEP 05105657, PCMEP 05105655; and German Patent Application Nos. DE 101 49 786, DE 102 14 395, DE 103 56 837, DE 10 2004 009 704, DE 10 2004 025 696, DE 10 2004 025 746, DE 10 2004 025 694, DE 10 2004 025 695, DE 10 2004 025 744, DE 10 2004 025 745, and DE 10 2005 012 301.

[0598] Other high-throughput sequencing systems include those disclosed in Venter, J., et al. Science 16 Feb. 2001; Adams, M. et al, Science 24 Mar. 2000; and M. J, Levene, et al. Science 299:682-686, January 2003; as well as US Publication Application No. 20030044781 and 2006/0078937. Overall such systems involve sequencing a target nucleic acid molecule having a plurality of bases by the temporal addition of bases via a polymerization reaction that is measured on a molecule of nucleic acid, i.e., the activity of a nucleic acid polymerizing enzyme on the template nucleic acid molecule to be sequenced is followed in real time. The sequence can then be deduced by identifying which base is being incorporated into the growing complementary strand of the target nucleic acid by the catalytic activity of the nucleic acid polymerizing enzyme at each step in the sequence of base additions. A polymerase on the target nucleic acid molecule complex is provided in a position suitable to move along the target nucleic acid molecule and extend the oligonucleotide primer at an active site. A plurality of labeled types of nucleotide analogs are provided proximate to the active site, with each distinguishably type of nucleotide analog being complementary to a different nucleotide in the target nucleic acid sequence. The growing nucleic acid strand is extended by using the polymerase to add a nucleotide analog to the nucleic acid strand at the active site, where the nucleotide analog being added is complementary to the nucleotide of the target nucleic acid at the active site. The nucleotide analog added to the oligonucleotide primer as a result of the polymerizing step is identified. The steps of providing labeled nucleotide analogs, polymerizing the growing nucleic acid strand, and identifying the added nucleotide analog are repeated so that the nucleic acid strand is further extended and the sequence of the target nucleic acid is determined.

[0599] In some embodiments, shotgun sequencing is performed. In shotgun sequencing, DNA is broken up randomly into numerous small segments, which are sequenced using the chain termination method to obtain reads. Multiple overlapping reads for the target DNA are obtained by performing several rounds of this fragmentation and sequencing. Computer programs then use the overlapping ends of different reads to assemble them into a continuous sequence.

### Producing the Synthetic Curon

[0600] The genetic elements and vectors comprising the genetic elements prepared as described herein can be used in a variety of ways to express the synthetic curon in appropriate host cells. In some embodiments, the genetic element and vectors comprising the genetic element are transfected in appropriate host cells and the resulting RNA may direct the expression of the curon gene products, e.g., non-pathogenic protein and protein binding sequence, at high levels. Host cell systems which provide for high levels of expression include continuous cell lines that supply viral functions, such as cell lines superinfected with APV or MPV, respectively, cell lines engineered to complement APV or MPV functions, etc.

[0601] In some embodiments, the synthetic curon is produced as described in any of Examples 1, 2, 5, 6, or 15-17.

[0602] In some embodiments, the synthetic curon is cultivated in continuous animal cell lines in vitro. According to one embodiment of the invention, the cell lines may include porcine cell lines. The cell lines envisaged in the context of the present invention include immortalised porcine cell lines such as, but not limited to the porcine kidney epithelial cell lines PK-15 and SK, the monomyeloid cell line 3D4/31 and the testicular cell line ST. Also, other mammalian cells likes are included, such as CHO cells (Chinese hamster ovaries), MARC-145, MDBK, RK-13, EEL. Additionally or alternatively, particular embodiments of the methods of the invention make use of an animal cell line which is an epithelial cell line, i.e. a cell line of cells of epithelial lineage. Cell lines susceptible to infection with curons include, but are not limited to cell lines of human or primate origin, such as human or primate kidney carcinoma cell lines.

[0603] In some embodiments, the genetic elements and vectors comprising the genetic elements are transfected into cell lines that express a viral polymerase protein in order to achieve expression of the curon. To this end, transformed cell lines that express a curon polymerase protein may be utilized as appropriate host cells. Host cells may be similarly engineered to provide other viral functions or additional functions.

[0604] To prepare the synthetic curon disclosed herein, a genetic element or vector comprising the genetic element disclosed herein may be used to transfect cells which provide curon proteins and functions required for replication and production. Alternatively, cells may be transfected with helper virus before, during, or after transfection by the genetic element or vector comprising the genetic element disclosed herein. In some embodiments, a helper virus may be useful to complement production of an incomplete viral particle. The helper virus may have a conditional growth defect, such as host range restriction or temperature sensitivity, which allows the subsequent selection of transfectant viruses. In some embodiments, a helper virus may provide one or more replication proteins utilized by the host cells to achieve expression of the curon. In some embodiments, the host cells may be transfected with vectors encoding viral proteins such as the one or more replication proteins.

[0605] The genetic element or vector comprising the genetic element disclosed herein can be replicated and produced into curon particles by any number of techniques known in the art, as described, e.g., in U.S. Pat. Nos. 4,650,764; 5,166,057; 5,854,037; European Patent Publication EP 0702085A1; U.S. patent application Ser. No. 09/152,845; International Patent Publications PCT WO97/12032; WO96/34625; European Patent Publication EP-A780475; WO 99/02657; WO 98/53078; WO 98/02530; WO 99/15672; WO 98/13501; WO 97/06270; and EPO 780 47SA1, each of which is incorporated by reference herein in its entirety.

[0606] The production of curon-containing cell cultures according to the present invention can be carried out in different scales, such as in flasks, roller bottles or bioreactors. The media used for the cultivation of the cells to be infected are known to the skilled person and will comprise the standard nutrients required for cell viability but may also comprise additional nutrients dependent on the cell type. Optionally, the medium can be protein-free. Depending on the cell type the cells can be cultured in suspension or on a substrate.

[0607] The purification and isolation of synthetic curons can be performed according to methods known by the skilled person in virus production and is described for example by Rinaldi, et al., DNA Vaccines: Methods and Protocols (Methods in Molecular Biology), 3rd ed. 2014, Humana Press.

[0608] In one aspect, the present invention includes a method for the in vitro replication and propagation of the curon as described herein, which may comprise the following steps: (a) transfecting a linearized genetic element into a cell line sensitive to curon infection; (b) harvesting the cells and isolating cells showing the presence of the genetic element; (c) culturing the cells obtained in step (b) for at least three days, such as at least one week or longer, depending on experimental conditions and gene expression; and (d) harvesting the cells of step (c).

### Administration/Delivery

[0609] The composition (e.g., a pharmaceutical composition comprising a synthetic curon as described herein) may be formulated to include a pharmaceutically acceptable excipient. Pharmaceutical compositions may optionally comprise one or more additional active substances, e.g. therapeutically and/or prophylactically active substances. Pharmaceutical compositions of the present invention may be sterile and/or pyrogen-free. General considerations in the formulation and/or manufacture of pharmaceutical agents may be found, for example, in Remington: The Science and Practice of Pharmacy 21st ed., Lippincott Williams & Wilkins, 2005 (incorporated herein by reference).

[0610] Although the descriptions of pharmaceutical compositions provided herein are principally directed to pharmaceutical compositions which are suitable for administration to humans, it will be understood by the skilled artisan that such compositions are generally suitable for administration to any other animal, e.g., to non-human animals, e.g. non-human mammals. Modification of pharmaceutical compositions suitable for administration to humans in order to render the compositions suitable for administration to various animals is well understood, and the ordinarily skilled veterinary pharmacologist can design and/or perform such modification with merely ordinary, if any, experimentation. Subjects to which administration of the pharmaceutical compositions is contemplated include, but are not limited to, humans and/or other primates; mammals, including commercially relevant mammals such as cattle, pigs, horses, sheep, cats, dogs, mice, and/or rats; and/or birds, including commercially relevant birds such as poultry, chickens, ducks, geese, and/or turkeys.

[0611] Formulations of the pharmaceutical compositions described herein may be prepared by any method known or hereafter developed in the art of pharmacology. In general, such preparatory methods include the step of bringing the active ingredient into association with an excipient and/or one or more other accessory ingredients, and then, if necessary and/or desirable, dividing, shaping and/or packaging the product.

[0612] In one aspect, the invention features a method of delivering a curon to a subject. The method includes administering a pharmaceutical composition comprising a curon as described herein to the subject. In some embodiments, the administered curon replicates in the subject (e.g., becomes a part of the virome of the subject).

[0613] In one aspect, the invention features a method of administering a curon to a subject with dysvirosis. The method includes selecting a subject having dysvirosis as described herein, and administering a pharmaceutical composition comprising a curon as described herein to the subject. In some embodiments, the administered curon replicates in the subject (e.g., becomes a part of the virome of the subject).

[0614] The pharmaceutical composition may include wild-type or native viral elements and/or modified viral elements. The curon may include one or more of the sequences (e.g., nucleic acid sequences or nucleic acid sequences encoding amino acid sequences thereof) in any of Tables 1-20 or a sequence with at least about 60%, 65%, 70%, 75%, 80%, 85%, 90% 95%, 96%, 97%, 98% and 99% nucleotide sequence identity to any one of the nucleotide sequences or a sequence that is complementary to the sequence in any of Tables 1-20. The curon may encode one or more of the sequences in any of Tables 1-20 or a sequence with at least about 60%, 65%, 70%, 75%, 80%, 85%, 90% 95%, 96%, 97%, 98% and 99% sequence identity to any one of the amino acid sequences in any of Tables 2, 4, 6, 8, 10, 12, 14, or 16. The curon may include one or more of the sequences in Table 19 or Table 20 or a sequence with at least about 60%, 65%, 70%, 75%, 80%, 85%, 90% 95%, 96%, 97%, 98% and 99% nucleotide sequence identity to any one of the nucleotide sequences or a sequence that is complementary to the sequence in Table 19 or Table 20.

[0615] In some embodiments, the synthetic curon is sufficient to increase (stimulate) endogenous gene and protein expression, e.g., at least about 5%, 10%, 15%, 20%, 25%, 30%, 35%, 40%, 45%, 50%, or more as compared to a reference, e.g., a healthy control. In certain embodiments, the synthetic curon is sufficient to decrease (inhibit) endogenous gene and protein expression, e.g., at least about 5%, 10%, 15%, 20%, 25%, 30%, 35%, 40%, 45%, 50%, or more as compared to a reference, e.g., a healthy control.

[0616] In some embodiments, the synthetic curon inhibits/enhances one or more viral properties, e.g., tropism, infectivity, immunosuppression/activation, in a host or host cell, e.g., at least about 5%, 10%, 15%, 20%, 25%, 30%, 35%, 40%, 45%, 50%, or more as compared to a reference, e.g., a healthy control.

[0617] In one aspect, the invention includes a method of identifying dysvirosis, e.g., dysregulation of viral populations present within a host, in a subject comprising analyzing genetic information from a sample obtained from a subject in need thereof, wherein viral genetic information is isolated from the subject's genetic information and other microorganisms; comparing the viral genetic information to a reference, e.g., a control, a healthy subject; and identifying dysvirosis in the subject if comparison of the viral genetic information yields an imbalance or irregular ratio of viral genetic information in the subject.

[0618] In one aspect, the present invention also includes a method for generating a database of genetic information for identifying dysviriosis in a diseased subject, which may comprise the following steps (i) determining nucleotide sequences of a host cell genome in a sample from a healthy subject; (ii) determining viral nucleic acid sequences present in the host cell genome and/or present in episomal form; (iii) compiling a database of the viral nucleic acid sequences determined in step (ii) associated with a specific viral strain; and (iv) repeat steps (i)-(iii) for a plurality of subjects to populate the database.

[0619] In one aspect, the invention includes a method of administering the pharmaceutical composition described herein to a subject with dysvirosis, comprising obtaining the viral genetic information as described herein and administering a pharmaceutical composition comprising the curon described herein in a dose sufficient to alter a virome within the subject, e.g., at least about 5%, 10%, 15%, 20%, 25%, 30%, 35%, 40%, 45%, 50%, or more as compared to a reference, e.g., a healthy control.

[0620] In some embodiments, the subject is administered the pharmaceutical composition further comprising one or more viral strains that are not represented in the viral genetic information.

[0621] In some embodiments, the pharmaceutical composition comprising a curon described herein is administered in a dose and time sufficient to modulate a viral infection. Some non-limiting examples of viral infections include adeno-associated virus, Aichi virus, Australian bat lyssavirus, BK polyomavirus, Banna virus, Barmah forest virus, Bunyamwera virus, Bunyavirus La Crosse, Bunyavirus snowshoe hare, Cercopithecine herpesvirus, Chandipura virus, Chikungunya virus, Cosavirus A, Cowpox virus, Coxsackievirus, Crimean-Congo hemorrhagic fever virus, Dengue virus, Dhori virus, Dugbe virus, Duvenhage virus, Eastern equine encephalitis virus, Ebolavirus, Echovirus, Encephalomyocarditis virus, Epstein-Barr virus, European bat lyssavirus, GB virus C/Hepatitis G virus, Hantaan virus, Hendra virus, Hepatitis A virus, Hepatitis B virus, Hepatitis C virus, Hepatitis E virus, Hepatitis delta virus, Horsepox virus, Human adenovirus, Human astrovirus, Human coronavirus, Human cytomegalovirus, Human enterovirus 68, Human enterovirus 70, Human herpesvirus 1, Human herpesvirus 2, Human herpesvirus 6, Human herpesvirus 7, Human herpesvirus 8, Human immunodeficiency virus, Human papillomavirus 1, Human papillomavirus 2, Human papillomavirus 16, Human papillomavirus 18, Human parainfluenza, Human parvovirus B19, Human respiratory syncytial virus, Human rhinovirus, Human SARS coronavirus, Human spumaretrovirus, Human T-lymphotropic virus, Human torovirus, Influenza A virus, Influenza B virus, Influenza C virus, Isfahan virus, JC polyomavirus, Japanese encephalitis virus, Junin arenavirus, KI Polyomavirus, Kunjin virus, Lagos bat virus, Lake Victoria marburgvirus, Langat virus, Lassa virus, Lordsdale virus, Louping ill virus, Lymphocytic choriomeningitis virus, Machupo virus, Mayaro virus, MERS coronavirus, Measles virus, Mengo encephalomyocarditis virus, Merkel cell polyomavirus, Mokola virus, Molluscum contagiosum virus, Monkeypox virus, Mumps virus, Murray valley encephalitis virus, New York virus, Nipah virus, Norwalk virus, O'nyong-nyong virus, Orf virus, Oropouche virus, Pichinde virus, Poliovirus, Punta toro phlebovirus, Puumala virus, Rabies virus, Rift valley fever virus, Rosavirus A, Ross river virus, Rotavirus A, Rotavirus B, Rotavirus C, Rubella virus, Sagiyama virus, Salivirus A, Sandfly fever sicilian virus, Sapporo virus, Semliki forest virus, Seoul virus, Simian foamy virus, Simian virus 5, Sindbis virus, Southampton virus, St. louis encephalitis virus, Tick-borne powassan virus, Torque teno virus, Toscana virus, Uukuniemi virus, Vaccinia virus, Varicella-zoster virus, Variola virus, Venezuelan equine encephalitis virus, Vesicular stomatitis virus, Western equine encephalitis virus, WU polyomavirus, West Nile virus, Yaba monkey tumor virus, Yaba-like disease virus, Yellow fever virus, and Zika Virus. In certain embodiments, the curon is sufficient to outcompete and/or displace a virus already present in the subject, e.g., at least about 5%, 10%, 15%, 20%, 25%, 30%, 35%, 40%, 45%, 50%, or more as compared to a reference. In certain embodiments, the curon is sufficient to compete with chronic or acute viral infection. In certain embodiments, the curon may be administered prophylactically to protect from viral infections (e.g. a provirotic). In some embodiments, the curon is in an amount sufficient to modulate (e.g., phenotype, virus levels, gene expression, compete with other viruses, disease state, etc. at least about 5%, 10%, 15%, 20%, 25%, 30%, 35%, 40%, 45%, 50%, or more).

[0622] All references and publications cited herein are hereby incorporated by reference.

[0623] The following examples are provided to further illustrate some embodiments of the present invention, but are not intended to limit the scope of the invention; it will be understood by their exemplary nature that other procedures, methodologies, or techniques known to those skilled in the art may alternatively be used.

### EXAMPLES

### Example 1: Preparation of Curons

[0624] This example describes the design and synthesis of a synthetic curon that inhibits interferon (IFN) expression.

[0625] A curon (Curon A) is designed starting with 1) a DNA sequence for a capsid gene encoding a non-pathogenic packaging enclosure (Arch Virol (2007) 152: 1961-1975), Accession Number: A7XCE8.1 (ORF11_TTW3); 2) a DNA sequence coding for a microRNA that targets a host gene (e.g. IFN) (PLOS Pathogen (2013), 9(12), e1003818), Accession number: AJ620231.1; and 3) a DNA sequence (Journal of Virology (2003), 77(24), 13036-13041) that binds to a specific region in the capsid protein, (e.g., specific region of capsid having an Accession Number: Q99153.1).

[0626] To this sequence is added 1 kb non-coding DNA sequences (Curon B). The designed curon (FIG. 2) is chemically synthesized into 3 kb (total size), which is sequence verified.

[0627] The curon sequence is transfected into human embryonic kidney 293T cells (1 mg per 10⁵ cells on 12-well plates) with JetPEI reagent (PolyPlus-transfection, Illkirch, France) as recommended by the manufacturer. Controls transfections are included with vector alone or cells transfected with JetPEI alone and transfection efficiencies are optimized with a reporter plasmid encoding GFP. Fluorescence of control transfections is measured to ensure properly transfected cells. Transfected cultures are incubated overnight at 37° C. and 5% carbon dioxide.

[0628] After 18 hrs, the cells are washed three times with PBS before adding fresh medium. The supernatant is collected for ultracentrifugation and harvest of curons as follows. The medium is cleared by centrifugation at 4,000×g for 30 min and then at 8,000×g for 15 min to remove cells and cell debris. The supernatant is then filtered through 0.45-μm-pore-size filters. Curons are pelleted at 27,000 rpm for 1 hr through a 5% sucrose cushion (5 ml) and resuspended in 1× phosphate-buffered saline (PBS) plus 0.1% bacitracin in 1/100 of the original volume. The concentrated Curons are centrifuged through a 20 to 35% sucrose step gradient at 24,000 rpm for 2 hr. The curon band at the gradient junction is collected. The curons are then diluted with 1×PBS and pelleted at 27,000 rpm for 1 hr. The Curon pellets are resuspended in 1×PBS and further purified through a 20 to 35% continuous sucrose gradient.

### Example 2: Large-Scale Production of Curons (Curon a and/or B)

[0629] This example describes production and propagation of curons.

[0630] Purified curons as described in Example 1 are prepared for large-scale amplification in spinner flasks with producer A549 cells grown in suspension. A549 cells are maintained in F12K medium, 10% fetal bovine serum, 2 mM glutamine and antibiotics. A549 cells are infected with curons at a curon load of 10⁶ curons to produce ˜1×10⁷ curon particles after an incubation at 37° C. and 5% carbon dioxide for 24 hrs. Cells are then washed three times with PBS and incubated with fresh medium for 6 hrs.

[0631] For curon purification, two ultracentrifugation steps based on cesium chloride gradients are performed followed by dialysis as follows (Bio-Protocol (2012) Biol01: e201). Cells are removed by centrifugation (6000×g for 10 min) and the supernatant is filtered through 0.8 and then 0.2 μm filters. The filtrate is concentrated by passage through filter membranes (100,000 mw) to a volume of 8 ml. The retentate is loaded into a cesium sulfate solution and centrifuged at 247,000×g for 20 h. Curon bands are removed, placed into 14,000 mw cutoff dialysis tubing, and dialyzed. A further concentration may be performed, if desired.

### Example 3: Effects of Curons In Vitro (Curon A)

[0632] This example describes in vitro assessment of expression and effector function, e.g., expression of the miRNA, of the curon after cell infection.

[0633] The effect of purified curons as described in Example 1 is assessed in vitro through endogenous gene regulation (e.g. IFN signaling). HEK293T cells are co-transfected with dual luciferase plasmids (firefly luciferase with an interferon-stimulated response element (ISRE) based promoter and transfection control Renilla luciferase with constitutive promoter): Luciferase reporter mix (pcDNA3.1dsRluc to pISRE-Luc at 1:4 ratio (Clonetech)) (J Virol (2008), 82: 9823-9828).

[0634] Curons are administered at multiplicity of infection of 107 to HEK293T cells seeded in a 6-well plate (2 sets of triplicates-3 control wells and 3 experimental wells with Curon A).

[0635] After 48 hours, the media is replaced with new media with or without 100 u/ml of universal type I interferon (PBL, Piscataway, N.J.). Sixteen hours after IFN treatment, a dual-luciferase assay (J Virol (2008), 82: 9823-9828) is performed to determine IFN signaling. Firefly luciferase is normalized to Renilla luciferase expression to control for transfection differences. The fold induction of the ISRE ffLuc reporter is calculated by dividing the comparable experimental wells by the control wells and induction of each condition is compared relative to the negative control.

[0636] In an embodiment, a decreased luciferase signal in the curon treatment group compared to a control will indicate that the curons decrease IFN production in the cells.

### Example 4: Immunologic Effects of Curons (Curon A)

[0637] This example describes in vivo effector function, e.g., expression of the miRNA, of the curon after administration.

[0638] Purified curons prepared as described in Examples 1 and 2 are intravenously administered to healthy pigs at various doses using hundred-fold dilutions starting from 10¹⁴ genome equivalents per kilogram down to 0 genome equivalents per kilogram. In order to evaluate the effects on immune tolerance, pigs are injected daily for 3 days with the dosages of curons specified above or vehicle control PBS and sacrificed after 3 days.

[0639] Spleen, bone marrow and lymph nodes are harvested. Single cell suspensions are prepared from each of the tissues and stained with extracellular markers for MHC-II, CD11c, and intracellular IFN. MHC+, CD11c+, IFN+ antigen presenting cells are analyzed via flow cytometry from each tissue, e.g., wherein a cell that is positive for a given one of the above-mentioned markers is a cell that exhibits higher fluorescence than 99% of cells in a negative control population that lack expression of the marker but is otherwise similar to the the assay population of cells, under the same conditions.

[0640] In an embodiment, a decreased number of IFN+ cells in the curon treatment group compared to the control will indicate that the curons decrease IFN production in cells after administration.

### Example 5: Preparation of Synthetic Curons

[0641] This example demonstrates in vitro production of a synthetic curon.

[0642] DNA sequences from LY1 and LY2 strains of TTMiniV (Eur Respir J. 2013 August; 42(2):470-9), between the EcoRV restriction enzyme sites, were cloned into a kanamycin vector (Integrated DNA Technologies). Curons including DNA sequences from the LY1 and LY2 strains of TTMiniV are referred to as Curon 1 and Curon 2 respectively, in Examples 6 and 7 and in FIGS. 6A-10B. Cloned constructs were transformed into 10-Beta competent E. coli. (New England Biolabs Inc.), followed by plasmid purification (Qiagen) according to the manufacturer's protocol.

[0643] DNA constructs (FIG. 3 and FIG. 4) were linearized with EcoRV restriction digest (New England Biolabs, Inc.) at 37 degree Celsius for 6 hours, followed by agarose gel electrophoresis, excision of a correctly size DNA band (2.9 kilobase pairs), and gel purification of DNA from excised agarose bands using a gel extraction kit (Qiagen) according to the manufacturer's protocol.

### Example 6: Assembly and Infection of Curons

[0644] This example demonstrates successful in vitro production of infectious curons using synthetic DNA sequences as described in Example 5.

[0645] Curon DNA (obtained in Example 5) was transfected into either HEK293T cells (human embryonic kidney cell line) or A549 cells (human lung carcinoma cell line), either in an intact plasmid or in linearized form, with lipid transfection reagent (Thermo Fisher Scientific). 6 ug of plasmid or 1.5 ug of linearized DNA was used for transfection of 70% confluent cells in T25 flasks. Empty vector backbone lacking the viral sequences included in the curon was used as a negative control. Six hours post-transfection, cells were washed with PBS twice and were allowed to grow in fresh growth medium at 37 degrees Celsius and 5% carbon dioxide. DNA sequences encoding the human Ef1alpha promoter followed by YFP gene were synthesized from IDT. This DNA sequence was blunt end ligated into a cloning vector (Thermo Fisher Scientific). The resulting vector was used as a control to assess transfection efficiency. YFP was detected using a cell imaging system (Thermo Fisher Scientific) 72 hours post transfection. The transfection efficiencies of HEK293T and A549 cells were calculated as 85% and 40% respectively (FIG. 5).

[0646] Supernatants of 293T and A549 cells transfected with curons were harvested 96 hours post transfection. The harvested supernatants were spun down at 2000 rpm for 10 minutes at 4 degrees Celsius to remove any cell debris. Each of the harvested supernatants was used to infect new 293T and A549 cells, respectively, that were 70% confluent in wells of 24 well plates. Supernatants were washed away after 24 hours of incubation at 37 degrees Celsius and 5% carbon dioxide, followed by two washes of PBS, and replacement with fresh growth medium. Following incubation of these cells at 37 degrees and 5% carbon dioxide for another 48 hours, cells were individually harvested for genomic DNA extraction. Genomic DNA from each of the samples was harvested using a genomic DNA extraction kit (Thermo Fisher Scientific), according to manufacturer's protocol.

[0647] To confirm the successful infection of 293T and A549 cells by curons produced in vitro, 100 ng of genomic DNA harvested as described herein was used to perform quantitative polymerase chain reaction (qPCR) using primers specific for beta-torqueviruses or LY2 specific sequences. SYBR green reagent (Thermo Fisher Scientific) was used to perform qPCR, as per manufacturer's protocol. qPCR for primers specific to genomic DNA sequence of GAPDH was used for normalization. The sequences for all the primers used are listed in Table 21.

TABLE 21

| | Primer sequence (5' > 3') | |
|---|---|---|
| Target | Forward | Reverse |
| Betatorqueviruses | ATTCGAATGGCTGAGTTTATGC | CCTTGACTACGGTGGTTTCAC |
| | (SEQ ID NO: 690) | (SEQ ID NO: 693) |
| LY2 TTMiniV strain | CACGAATTAGCCAAGACTGGGCAC | TGCAGGCATTCGAGGGCTTGTT |
| | (SEQ ID NO: 691) | (SEQ ID NO: 694) |
| GAPDH | GCTCCCACTCCTGATTTCTG | TTTAACCCCCTAGTCCCAGG |
| | (SEQ ID NO: 692) | (SEQ ID NO: 695) |

[0648] As shown in the qPCR results depicted in FIGS. 6A, 6B, 7A, and 7B, the curons produced in vitro and as described in this example were infectious.

### Example 7: Selectivity of Curons

[0649] This example demonstrates the ability of synthetic curons produced in vitro to infect cell lines of a variety of tissue origins.

[0650] Supernatants with the infectious TTMiniV curons (described in Example 5) were incubated with 70% confluent 293T, A549, Jurkat (an acute T cell leukemia cell line), Raji (a Burkitt's lymphoma B cell line), and Chang (a liver carcinoma cell line) cell lines at 37 degrees and 5% carbon dioxide in wells of 24 well plates. Cells were washed with PBS twice, 24 hours post infection, followed by replacement with fresh growth medium. Cells were then incubated again at 37 degrees and 5% carbon dioxide for another 48 hours, followed by harvest for genomic DNA extraction. Genomic DNA from each of the samples was harvested using a genomic DNA extraction kit (Thermo Fisher Scientific), according to manufacturer's protocol.

[0651] To confirm successful infection of these cell lines by curons produced in the previous Example, 100 ng of genomic DNA harvested as described herein was used to perform quantitative polymerase chain reaction (qPCR) using primers specific for beta-torqueviruses or LY2 specific sequences. SYBR green reagent (Thermo Fisher Scientific) was used to perform qPCR, as per manufacturer's protocol. qPCR for primers specific to genomic DNA sequence of GAPDH was used for normalization. The sequences for all the primers used are listed in Table 21.

[0652] As shown in the qPCR results depicted in FIGS. 6A-10B, not only were curons produced in vitro infectious, they were able to infect a variety of cell lines, including examples of epithelial cells, lung tissue cells, liver cells, carcinoma cells, lymphocytes, lymphoblasts, T cells, B cells, and kidney cells. It was also observed that a synthetic curon was able to infect HepG2 cells, resulting in a greater than 100-fold increase relative to a control.

### Example 8: Identification and Use of Protein Binding Sequences

[0653] This example describes putative protein-binding sites in the Anellovirus genome, which can be used for amplifying and packaging effectors, e.g., in a curon as described herein. In some instances, the protein-binding sites may be capable of binding to an exterior protein, such as a capsid protein.

[0654] Two conserved domains within the Anellovirus genome are putative origins of replication: the 5′ UTR conserved domain (5CD) and the GC-rich domain (GCR) (de Villiers et al., Journal of Virology 2011; Okamoto et al., Virology 1999). In one example, in order to confirm whether these sequences act as DNA replication sites or as capsid packaging signals, deletions of each region are made in plasmids harboring TTMV-LY2. A539 cells are transfected with pTTMV-LY2Δ5CD or pTTMV-LY2ΔGCR. Transfected cells are incubated for four days, and then virus is isolated from supernatant and cell pellets. A549 cells are infected with virus, and after four days, virus is isolated from the supernatant and infected cell pellets. qPCR is performed to quantify viral genomes from the samples. Disruption of an origin of replication prevents viral replicase from amplifying viral DNA and results in reduced viral genomes isolated from transfected cell pellets compared to wild-type virus. A small amount of virus is still packaged and can be found in the transfected supernatant and infected cell pellets. In some embodiments, disruption of a packaging signal will prevent the viral DNA from being encapsulated by capsid proteins. Therefore, in embodiments, there will still be an amplification of viral genomes in the transfected cells, but no viral genomes are found in the supernatant or infected cell pellets.

[0655] In a further example, in order to characterize additional replication or packaging signals in the DNA, a series of deletions across the entire TTMV-LY2 genome is used. Deletions of 100 bp are made stepwise across the length of the sequence. Plasmids harboring TTMV-LY2 deletions are transfected into A549 and tested as described above. In some embodiments, deletions that disrupt viral amplification or packaging will contain potential cis-regulatory domains.

[0656] Replication and packaging signals can be incorporated into effector-encoding DNA sequences (e.g., in a genetic element in a curon) to induce amplification and encapsulation. This is done both in context of larger regions of the curon genome (i.e., inserting effectors into a specific site in the genome, or replacing viral ORFs with effectors, etc.), or by incorporating minimal cis signals into the effector DNA. In cases where the curon lacks trans replication or packaging factors (e.g., replicase and capsid proteins, etc.), the trans factors are supplied by helper genes. The helper genes express all of the proteins and RNAs sufficient to induce amplification and packaging, but lack their own packaging signals. The curon DNA is co-transfected with helper genes, resulting in amplification and packaging of the effector but not of the helper genes.

### Example 9: A Minimal Anellovirus Genome

[0657] This Example describes deletions in the Anellovirus genome, both to help characterize the minimal genome sufficient for replicating virus and to insert effector payloads.

[0658] A 172-nucleotide (nt) deletion was made in the non-coding region (NCR) of TTV-tth8 downstream of the ORFs but upstream of the GC-rich region (nts 3436 to 3607). A random 56-nt sequence (TTTGTGACACAAGATGGCCGACTTCCTTCCTCTTTAGTCTTCCCCAAAGAAGACAA (SEQ ID NO: 696)) was inserted into the deletion. 2 μg of circular or linearized (by SmaI) pTTV-tth8(3436-3707::56nt), a DNA plasmid harboring the altered TTV-tth8, was transfected into HEK293 or A549 cells at 60% confluency in a 6 cm plate using lipofectamine 2000, in duplicate. Virus was isolated from cell pellets and supernatant 96 hours post transfection by freeze thaw, alternating three times between liquid nitrogen and 37° C. water bath. Virus from supernatant was used to re-infect cells (HEK293 cells infected by virus isolated from HEK293, and A549 cells infected by virus isolated from A549). 72 hours after infection, virus was isolated from cell pellets and supernatant by freeze thaw. qPCR was performed on all samples. As shown in Table 22 below, TTV-tth8 was observed in both the cell pellet and supernatant of infected cells, indicating successful virus production by pTTV-tth8(3436-3707::56nt). Therefore, TTV-tth8 is able to tolerate deletion of nts 3436 to 3707.

TABLE 22
TTV-tth8(3436-3707::56nt) infections in HEK293 and A549 result in viral
amplification. Average genome equivalents from duplicate experiments
compared to negative control cells with no plasmid or virus added.

| Genome | | | | | | | |
|---|---|---|---|---|---|---|---|
| Equivalents/Rx | | HEK293 P0 | HEK293 P1 | A549 P0 | A549 P1 | Negatives | |
| TTH8 | Sup | 2.45E+06 | 1.02E+03 | 1.87E+07 | 1.00E+04 | 293 Empty | 1.42E+02 |
| Linear | Cell | 2.52E+08 | 3.92E+05 | 2.89E+08 | 7.57E+05 | 293 Neg | 5.08E+02 |
| TTH8 | Sup | 1.69E+06 | 6.83E+02 | 5.07E+02 | 1.05E+04 | 549 Empty | 1.73E+01 |
| circular | Cell | 2.00E+08 | 3.75E+05 | 2.61E+08 | 8.36E+05 | 549 Neg | 2.08E+01 |

[0659] An engineered version of TTMV-LY2 was assembled, deleting nucleotides 574 to 1371 and 1432 to 2210 (1577 bp deletion) and inserting a 513 bp NanoLuc (nLuc) reporter ORF at the C-terminus of ORF1 (after nt 2609 in wild-type TTMV-LY2). Plasmids harboring the DNA sequence for the engineered TTMV-LY2 (pVL46-015B) were transfected into A549 cells, and then virus was isolated and used to infect new A549 cells, as described in Example 17. nLuc luminescence was detected in the cell pellets and supernatant of the infected cells, indicating viral replication (FIGS. 11A-11B). This demonstrates that TTMV-LY2 can tolerate at least a 1577 bp deletion in the ORF region.

[0660] To further characterize a minimal viral genome sufficient for replication, a series of deletions are made in the TTMV-LY2 DNA. A TTMV-LY2 with deletions of nts 574-1371 and 1432-2210 but no nLuc insertion is made and tested for viral replication as described previously. Further deletions are made to TTMV-LY2Δ574-1371, Δ1432-2210. Nts 1372-1431 are deleted to create TTMV-LY2Δ574-2210. Additionally, ORF3 sequence downstream of ORF1 is deleted (Δ2610-2809). Finally, to test deletions in non-coding regions, a series of 100 bp deletions are made sequentially across the NCR. All deletion mutants are tested for viral replication as previously described. Deletions that result in successful viral production (indicating that the deleted region is not essential for viral replication) are combined to make variants of TTMV-LY2 with more deleted nucleotides. This strategy will provide a minimal virus sufficient for self-amplification. To identify the minimal virus that can be amplified with helpers, each of the deletion mutants that disrupted viral replication is tested alongside helper genes carrying trans replication and packaging elements. Deletions rescued by trans expression of replication elements indicate areas of the viral genome that can be deleted to form a minimal virus when helper genes are provided from a separate source.

### Example 10: Nucleotide Insertions of Various Lengths into an Anellovirus Genome

[0661] This example describes the addition of DNA sequences of various lengths into an Anellovirus genome, which can, in some instances, be used to generate a curon as described herein.

[0662] DNA sequences are cloned into plasmids harboring TTV-tth8 (GenBank accession number AJ620231.1) and TTMV-LY2 (GenBank accession number JX134045.1). Insertions are made in the noncoding regions (NCR) 3′ of the open reading frames and 5′ of the GC-rich region: after nucleotide 3588 in TTV-tth8, or nucleotide 2843 in TTMV-LY2.

[0663] Randomized DNA sequences of the following lengths are inserted into the NCRs of TTV-tth8 and TTMV-LY2: 100 base pairs (bp), 200 bp, 500 bp, 1000 bp, and 2000 bp. These sequences are designed to match the relative GC-content of each viral genome: approximately 50% GC for insertions into TTV-tth8, and approximately 38% GC for TTMV-LY2. In addition, several trans genes are inserted into the NCR. These include a miRNA driven by a U6 promoter (351 bp) and EGFP driven by a constitutive hEF1a promoter (2509 bp).

[0664] TTV-tth8 and TTMV-LY2 variants harboring various sized DNA inserts are transfected into mammalian cell lines, including HEK293 and A549, as previously described. Virus is isolated from the supernatant or cell pellets. Isolated virus is used to infect additional cells. Production of virus from the infected cells is monitored by quantitative PCR. In some embodiments, successful production of virus will indicate tolerance of insertions.

### Example 11: Exemplary Cargo to be Delivered

[0665] This example describes exemplary classes of nucleic acid and protein payloads that may be delivered with a curon, e.g., a curon based on an Anellovirus, e.g., as described herein.

[0666] One example of a payload is mRNA for protein expression. A coding sequence of interest is transcribed from either a viral promoter native to the source virus (e.g., an Anellovirus) or from a promoter introduced with the payload as part of a trans gene. Alternatively, the mRNA is encoded within the open reading frames of the viral mRNAs, resulting in fusions between viral proteins and the protein of interest. Cleavage domains, for example, the 2A peptide or a proteinase target site, may be used to separate the protein of interest from the viral proteins when desired.

[0667] Non-coding RNAs (ncRNAs) are another example of a payload. These RNAs are generally transcribed using RNA polymerase III promoters, such as U6 or VA. Alternatively, an ncRNA is transcribed using RNA polymerase II, such as the native viral promoter or regulatable synthetic promoters. When expressed from RNA polymerase II promoters, the ncRNAs are encoded as part of the mRNA exon, introns, or as extra RNA transcribed downstream of the poly-A signal. ncRNAs are often encoded as part of a larger RNA molecule or are cleaved apart using ribozymes or endoribonucleases. ncRNAs that can be encoded as cargo in the genome of a curon include micro-RNA (miRNA), small-interfering RNAs (siRNA), short hairpin RNA (shRNA), antisense RNA, miRNA sponges, long-noncoding RNA (lncRNA), and guide RNA (gRNA).

[0668] DNA may be used as a functional element without requiring RNA transcription. For example, DNA may be used as a template for homologous recombination. In another example, a protein-binding DNA sequence may be used to drive packaging of proteins of interest into a capsid (e.g., in a proteinaceous exterior of a curon). For homologous recombination, regions of homology to human genomic DNA are encoded into the vector DNA to act as homology arms. Recombination can be driven by a targeted endonuclease (such as Cas9 with a gRNA, or a zinc-finger nuclease), which can be expressed either from the vector or from a separate source. Inside the cell, a single-stranded DNA genome is converted to double-stranded DNA, which then acts as a template for homologous recombination at the genomic DNA break site. For recruiting proteins of interest, a protein-binding sequence can be encoded in the curon DNA. A DNA-binding protein of interest, or a protein of interest fused to a DNA-binding protein (such as Gal4), binds to the curon DNA. When the curon DNA is encapsulated by the capsid proteins, the DNA-binding protein is encapsulated too, and can be delivered to cells with the curon.

### Example 12: Exemplary Payload Integration Loci

[0669] This example describes exemplary loci in the genomes of TTV-tth8 (GenBank accession number AJ620231.1) and TTMV-LY2 (GenBank accession number JX134045) into which nucleic acid payloads can be inserted.

[0670] Several strategies can be employed for insertions into the open reading frame (ORF) regions of TTV-tth8 (nucleotides 336 to 3015) and TTMV-LY2 (nucleotides 424 to 2812). In one example, in order to tag viral proteins or create fusion proteins, a payload is inserted in frame within the specific ORF of interest. Alternatively, part or all of the ORF region is deleted, which may or may not disrupt viral protein function. The payload is then inserted into the deleted region. Additionally, a hyper-variable domain (HVD) in ORF1 of TTV-tth8 (between nucleotides 716 and 2362) or TTMV-LY2 (between nucleotides 724 and 2273) can be used as an insertion site.

[0671] Alternatively, payload insertions are made into regions of the vector comparable to the non-coding regions (NCRs) of TTV-tth8 or TTMV-LY2. In particular, insertions are made in the 5′ NCR upstream of the TATA box, in the 5′ untranslated region (UTR), in the 3′ NCR downstream of the poly-A signal and upstream of the GC-rich region. Additionally, insertions are made into the miRNA region of TTV-tth8 (nucleotides 3429 to 3506). For the 5′ NCR region, insertions are made upstream of the TATA box (between nucleotides 1 and 82 in TTV-tth8, and nucleotides 1 and 236 in TTMV-LY2). In some embodiments, trans genes are inserted in the reverse orientation to reduce promoter interference. For the 5′ UTR, insertions are made downstream of the transcriptional start site (nucleotide 111 in TTV-tth8, and nucleotide 267 in TTMV-LY2) and upstream of the ORF2 start codon (nucleotide 336 in TTV-tth8, and nucleotide 421 in TTMV-LY2). 5′ UTR insertions add or replace nucleotides in the 5′ UTR. 3′ NCR insertions are made upstream of the GC-rich region, in particular after nucleotide 3588 in TTV-tth8 or nucleotide 2843 in TTMV-LY2, as described in Example 10. The miRNA of TTV-tth8 is replaced by alternative natural or synthetic miRNA hairpins.

### Example 13: Defined Categories of Anellovirus and Conserved Regions Thereof

[0672] There are three genera of Anellovirus present in humans: alphatorquevirus (Torque Teno Virus, TTV), betatorquevirus (Torque Teno Midi Virus, TTMDV), and gammatorquevirus (Torque Teno Mini Virus, TTMV). Within alphatorquevirus, there are five well-supported phylogenetic clades (FIG. 11C). It is contemplated that any of these Anelloviruses can be used as a source virus (e.g., a source of viral DNA sequences) for producing a curon as described herein.

[0673] Among these sequences, the highest conservation is found in the 5′ UTR domain (about 75% conserved) and the GC-rich domain (greater than 100 base pairs, greater than 70% GC-content, about 70% conserved). Additional, a hypervariable domain (HVD) in the sequences has very low conservation (about 30% conserved). All Anelloviruses also contain a region in which all three reading frames are open.

[0674] Also provided herein are exemplary sequences of representative viruses from each of the TTV clades, and of TTMDV and TTMV, annotated with the conserved regions (see, e.g., Tables 1-14).

### Example 14: Replication-Deficient Curons and Helper Viruses

[0675] For replication and packaging of a curon, some elements can be provided in trans. These include proteins or non-coding RNAs that direct or support DNA replication or packaging. Trans elements can, in some instances, be provided from a source alternative to the curon, such as a helper virus, plasmid, or from the cellular genome.

[0676] Other elements are typically provided in cis. These elements can be, for example, sequences or structures in the curon DNA that act as origins of replication (e.g., to allow amplification of curon DNA) or packaging signals (e.g., to bind to proteins to load the genome into the capsid). Generally, a replication deficient virus or curon will be missing one or more of these elements, such that the DNA is unable to be packaged into an infectious virion or curon even if other elements are provided in trans.

[0677] Replication deficient viruses can be useful as helper viruses, e.g., for controlling replication of a curon (e.g., a replication-deficient or packaging-deficient curon) in the same cell. In some instances, the helper virus will lack cis replication or packaging elements, but express trans elements such as proteins and non-coding RNAs. Generally, the therapeutic curon would lack some or all of these trans elements and would therefore be unable to replicate on its own, but would retain the cis elements. When co-transfected/infected into cells, the replication-deficient helper virus would drive the amplification and packaging of the curon. The packaged particles collected would thus be comprised solely of therapeutic curon, without helper virus contamination.

[0678] To develop a replication deficient curon, conserved elements in the non-coding regions of Anellovirus will be removed. In particular, deletions of the conserved 5′ UTR domain and the GC-rich domain will be tested, both separately and together. Both elements are contemplated to be important for viral replication or packaging. Additionally, deletion series will be performed across the entire non-coding region to identify previously unknown regions of interest.

[0679] Successful deletion of a replication element will result in reduction of curon DNA amplification within the cell, e.g., as measured by qPCR, but will support some infectious curon production, e.g., as monitored by assays on infected cells that can include any or all of qPCR, western blots, fluorescence assays, or luminescence assays. Successful deletion of a packaging element will not disrupt curon DNA amplification, so an increase in curon DNA will be observed in transfected cells by qPCR. However, the curon genomes will not be encapsulated, so no infectious curon production will be observed.

### Example 15: Manufacturing Process for Replication-Competent Curons

[0680] This example describes a method for recovery and scaling up of production of replication-competent curons. Curons are replication competent when they encode in their genome all the required genetic elements and ORFs necessary to replicate in cells. Since these curons are not defective in their replication they do not need a complementing activity provided in trans. They might, however need helper activity, such as enhancers of transcriptions (e.g. sodium butyrate) or viral transcription factors (e.g. adenoviral E1, E2 E4, VA; HSV Vp16 and immediate early proteins).

[0681] In this example, double-stranded DNA encoding the full sequence of a synthetic curon either in its linear or circular form is introduced into 5E+05 adherent mammalian cells in a T75 flask by chemical transfection or into 5E+05 cells in suspension by electroporation. After an optimal period of time (e.g., 3-7 days post transfection), cells and supernatant are collected by scraping cells into the supernatant medium. A mild detergent, such as a biliary salt, is added to a final concentration of 0.5% and incubated at 37° C. for 30 minutes. Calcium and Magnesium Chloride is added to a final concentration of 0.5 mM and 2.5 mM, respectively. Endonuclease (e.g. DNAse I, Benzonase), is added and incubated at 25-37° C. for 0.5-4 hours. Curon suspension is centrifuged at 1000×g for 10 minutes at 4° C. The clarified supernatant is transferred to a new tube and diluted 1:1 with a cryoprotectant buffer (also known as stabilization buffer) and stored at −80° C. if desired. This produces passage 0 of the curon (P0). To bring the concentration of detergent below the safe limit to be used on cultured cells, this inoculum is diluted at least 100-fold or more in serum-free media (SFM) depending on the curon titer.

[0682] A fresh monolayer of mammalian cells in a T225 flask is overlaid with the minimum volume sufficient to cover the culture surface and incubated for 90 minutes at 37° C. and 5% carbon dioxide with gentle rocking. The mammalian cells used for this step may or may not be the same type of cells as used for the P0 recovery. After this incubation, the inoculum is replaced with 40 ml of serum-free, animal origin-free culture medium. Cells are incubated at 37° C. and 5% carbon dioxide for 3-7 days. 4 ml of a 10× solution of the same mild detergent previously utilized is added to achieve a final detergent concentration of 0.5%, and the mixture is then incubated at 37° C. for 30 minutes with gentle agitation. Endonuclease is added and incubated at 25-37° C. for 0.5-4 hours. The medium is then collected and centrifuged at 1000×g at 4° C. for 10 minutes. The clarified supernatant is mixed with 40 ml of stabilization buffer and stored at −80° C. This generates a seed stock, or passage 1 of curon (P1).

[0683] Depending on the titer of the stock, it is diluted no less than 100-fold in SFM and added to cells grown on multilayer flasks of the required size. Multiplicity of infection (MOI) and time of incubation is optimized at smaller scale to ensure maximal curon production. After harvest, curons may then be purified and concentrated as needed. A schematic showing a workflow, e.g., as described in this example, is provided in FIG. 12.

### Example 16: Manufacturing Process of Replication-Deficient Curons

[0684] This example describes a method for recovery and scaling up of production of replication-deficient curons.

[0685] Curons can be rendered replication-deficient by deletion of one or more ORFs (e.g., ORF1, ORF1/1, ORF1/2, ORF2, ORF2/2, ORF2/3, and/or ORF2t/3) involved in replication. Replication-deficient curons can be grown in a complementing cell line. Such cell line constitutively expresses components that promote curon growth but that are missing or nonfunctional in the genome of the curon.

[0686] In one example, the sequence(s) of any ORF(s) involved in curon propagation are cloned into a lentiviral expression system suitable for the generation of stable cell lines that encode a selection marker, and lentiviral vector is generated as described herein. A mammalian cell line capable of supporting curon propagation is infected with this lentiviral vector and subjected to selective pressure by the selection marker (e.g., puromycin or any other antibiotic) to select for cell populations that have stably integrated the cloned ORFs. Once this cell line is characterized and certified to complement the defect in the engineered curon, and hence to support growth and propagation of such curons, it is expanded and banked in cryogenic storage. During expansion and maintenance of these cells, the selection antibiotic is added to the culture medium to maintain the selective pressure. Once curons are introduced into these cells, the selection antibiotic may be withheld.

[0687] Once this cell line is established, growth and production of replication-deficient curons is carried out, e.g., as described in Example 15.

### Example 17: Production of Curons Using Suspension Cells

[0688] This example describes the production of curons in cells in suspension.

[0689] In this example, an A549 or 293T producer cell line that is adapted to grow in suspension conditions is grown in animal component-free and antibiotic-free suspension medium (Thermo Fisher Scientific) in WAVE bioreactor bags at 37 degrees and 5% carbon dioxide. These cells, seeded at 1×10⁶ viable cells/mL, are transfected using lipofectamine 2000 (Thermo Fisher Scientific) under current good manufacturing practices (cGMP), with a plasmid comprising curon sequences, along with any complementing plasmids suitable or required to package the curon (e.g., in the case of a replication-deficient curon, e.g., as described in Example 16). The complementing plasmids can, in some instances, encode for viral proteins that have been deleted from the curon genome (e.g., a curon genome based on a viral genoe, e.g., an Anellovirus genome, e.g., as described herein) but are useful or required for replication and packaging of the curons. Transfected cells are grown in the WAVE bioreactor bags and the supernatant is harvested at the following time points: 48, 72, and 96 hours post transfection. The supernatant is separated from the cell pellets for each sample using centrifugation. The packaged curon particles are then purified from the harvested supernatant and the lysed cell pellets using ion exchange chromatography.

[0690] The genome equivalents in the purified prep of the curons can be determined, for example, by using a small aliquot of the purified prep to harvest the curon genome using a viral genome extraction kit (Qiagen), followed by qPCR using primers and probes targeted towards the curon DNA sequence, e.g., as described in Example 18.

[0691] The infectivity of the curons in the purified prep can be quantified by making serial dilutions of the purified prep to infect new A549 cells. These cells are harvested 72 hours post transfection, followed by a qPCR assay on the genomic DNA using primers and probes that are specific to the curon DNA sequence.

### Example 18: Quantification of Curon Genome Equivalents by qPCR

[0692] This example demonstrates the development of a hydrolysis probe-based quantitative PCR assay to quantify curons. Sets of primers and probes were designed based on selected genome sequences of TTV (Accession No. AJ620231.1) and TTMV (Accession No. JX134045.1) using the software Geneious with a final user optimization. Primer sequences are shown in Table 23 below.

TABLE 23
Sequences of forward and reverse primers and
hydrolysis probes used to quantify TTMV
and TTV genome equivalents by quantitative PCR.

| | | SEQ ID |
|---|---|---|
| | | NO: |
| TTMV | | |
| Forward Primer | 5'-GAAGCCCACCAAAAGCAATT-3' | 697 |
| Reverse Primer | 5'-AGTTCCCGTGTCTATAGTCGA-3' | 698 |
| Probe | 5'-ACTTCGTTACAGAGTCCAGGGG-3' | 699 |
| TTV | | |
| Forward Primer | 5'-AGCAACAGGTAATGGAGGAC-3' | 700 |
| Reverse Primer | 5'-TGGAAGCTGGGGTCTTTAAC-3' | 701 |
| Probe | 5'-TCTACCTTAGGTGCAAAGGGCC-3' | 702 |

[0693] As a first step in the development process, qPCR is run using the TTV and TTMV primers with SYBR-green chemistry to check for primer specificity. FIG. 13 shows one distinct amplification peak for each primer pair.

[0694] Hydrolysis probes were ordered labeled with the fluorophore 6FAM at the 5′ end and a minor groove binding, non-fluorescent quencher (MGBNFQ) at the 3′ end. The PCR efficiency of the new primers and probes was then evaluated using two different commercial master mixes using purified plasmid DNA as component of a standard curve and increasing concentrations of primers. The standard curve was set up by using purified plasmids containing the target sequences for the different sets of primers-probes. Seven tenfold serial dilutions were performed to achieve a linear range over 7 logs and a lower limit of quantification of 15 copies per 20 ul reaction. Master mix #2 was capable of generating a PCR efficiency between 90-110%, values that are acceptable for quantitative PCR (FIG. 14). All primers for qPCR were ordered from IDT. Hydrolysis probes conjugated to the fluorophore 6FAM and a minor groove binding, non-fluorescent quencher (MGBNFQ) as well as all the qPCR master mixes were obtained from Thermo Fisher. An exemplary amplification plot is shown in FIG. 15.

[0695] Using these primer-probe sets and reagents, the genome equivalent (GEq)/ml in curon stocks was quantified. The linear range was between 1.5E+07-15 GEq per 20 ul reaction, which was then used to calculate the GEq/ml, as shown in FIGS. 16A-16B. Samples with higher concentrations than the linear range can be diluted as needed.

### Example 19: Utilizing Curons to Express an Exogenous Protein in Mice

[0696] This example describes the usage of a curon in which the Torque Teno Mini Virus (TTMV) genome is engineered to express the firefly luciferase protein in mice.

[0697] The plasmid encoding the DNA sequence of the engineered TTMV encoding the firefly-luciferase gene is introduced into A549 cells (human lung carcinoma cell line) by chemical transfection. 18 ug of plasmid DNA is used for transfection of 70% confluent cells in a 10 cm tissue culture plate. Empty vector backbone lacking the TTMV sequences is used as a negative control. Five hours post-transfection, cells are washed with PBS twice and are allowed to grow in fresh growth medium at 37° C. and 5% carbon dioxide.

[0698] Transfected A549 cells, along with their supernatant, are harvested 96 hours post transfection. Harvested material is treated with 0.5% deoxycholate (weight in volume) at 37° C. for 1 hour followed by endonuclease treatment. Curon particles are purified from this lysate using ion exchange chromatography. To determine curon concentration, a sample of the curon stock is run through a viral DNA purification kit and genome equivalents per ml are measured by qPCR using primers and probes targeted towards the curon DNA sequence.

[0699] A dose-range of genome equivalents of curons in 1× phosphate-buffered saline is performed via a variety of routes of injection (e.g. intravenous, intraperitoneal, subcutaneous, intramuscular) in mice at 8-10 weeks of age. Ventral and dorsal bioluminescence imaging is performed on each animal at 3, 7, 10 and 15 days post injection. Imaging is performed by adding the luciferase substrate (Perkin-Elmer) to each animal intraperitoneally at indicated time points, according to the manufacturer's protocol, followed by intravital imaging.

### Example 20: Genome Alignments to Determine Whether Curon DNA Integrated into Host Genomes

[0700] This example describes the computational analysis performed to determine whether curon DNA can integrate into the host genome, by examining whether Torque Teno Virus (TTV) has integrated into the human genome.

[0701] The complete genomes of one representative TTV sequence from each of clades 1-5 were aligned against the human genome sequence using the Basic Local Alignment Search Tool (BLAST) that finds regions of local similarity between sequences. The representative TTV sequences shown in Table 24 were analyzed:

TABLE 24
Representative TTV sequences

| TTV Clade | NCBI Accession No. |
|---|---|
| Clade 1 | AB064597.1 |
| Clade 2 | AB028669.1 |
| Clade 3 | AJ20231.1 |
| Clade 4 | AF122914.3 |
| Clade 5 | AF298585.1 |

Sequences from none of the aligned TTVs were found to have any significant similarity to the human genome, indicating that the TTVs have not integrated into the human genome.

### Example 21: Assessment of Curon Integration into a Host Genome

[0702] In this example, A549 cells (human lung carcinoma cell line) and HEK293T cells (human embryonic kidney cell line) are infected with either curon particles or AAV particles at MOIs of 5, 10, 30 or 50. The cells are washed with PBS 5 hours post infection and replaced with fresh growth medium. The cells are then allowed to grow at 37 degrees and 5% carbon dioxide. Cells are harvested five days post infection and they are processed to harvest genomic DNA, using the genomic DNA extraction kit (Qiagen). Genomic DNA is also harvested from uninfected cells (negative control). Whole-genome sequencing libraries are prepared for these harvested DNAs, using the Nextera DNA library preparation kit (Illumina), according to manufacturers protocol. The DNA libraries are sequenced using the NextSeq 550 system (Illumina) according to manufacturer's protocol. Sequencing data is assembled to the reference genome and analyzed to look for junctions between curon or AAV genomes and host genome. In cases where junctions are detected they are verified in the original genomic DNA sample prior sequencing library preparation by PCR. Primers are designed to amplify the region containing and around the junctions. The frequency of integration of Curons into the host genome is determined by quantifying the number of junctions (representing integration events) and the total number of curon copies in the sample by qPCR. This ratio can be compared to that of AAV.

### Example 22: Functional Effects of a Curon Expressing an Exogenous microRNA Sequence

[0703] This example provides a successful demonstration of function of curons expressing exogenous microRNA (miRNA) sequences.

[0704] Curon DNA sequences were generated that contained one of the following exogenous microRNA sequences in the 3′ non-coding region (NCR):
[0705] 1) miR-124
[0706] 2) miR-518
[0707] 3) miR-625
[0708] 4) Non-targeting scramble miRNA (miR-scr)

[0709] This was done by replacing the pre-miRNA sequence of the tth8-T1 miRNA of TTV-tth8 with the pre-miRNA sequences of the miRNAs mentioned above. Curon DNAs were then transfected into HEK293T cells seperately. Transfected 293T cells, along with the supernatants were harvested 96 hours post transfection. Harvested material was treated with 0.5% deoxycholate (weight in volume) at 37 degrees Celsius, followed by endonuclease treatment. This lysate containing the packaged curons (P0 stock of curons) were used to infect new 293T cells. These cells were harvested 96 hours, post infection. The harvested cells were then treated with 0.5% deoxycholate (weight in volume) at 37 degrees Celsius, followed by endonuclease treatment. This lysate was then dialyzed in the 10K molecular-weight cutoff dialysis cassettes in PBS at 4 degrees overnight to remove any deoxycholate. The titer of the curon was quantified in these dialyzed lysate (P1 stock of curon) using qPCR. P1 stock of curons were then incubated with several KRAS mutant non-small cell lung cancer (NSCLC) cell lines (SW900, NCI-H460, and A549) for 3 days at a titer of 274 genome equivalents per cell. Cell viability was measured with an Alamar blue assay. As shown in FIG. 17A, curons expressing an exogenous miR-625 significantly inhibited cancer cell line viability in all three NSCLC cell lines as compared to cells infected with control curons expressing a scrambled non-targeted miRNA and uninfected cells.

[0710] Additionally, a YFP-reporter assay was used to determine the downregulation of the target by curon miRNA by site specific binding to its target site. A YFP reporter that has a specific binding sequence for miR-625 was generated and transfected into HEK293T cells. 24 hours after transfection, these HEK293T cells were infected with curons expressing either miR-625 or a non-specific miRNA (miR-124) at a titer of 2.4 genome equivalents per cell, and YFP fluorescence was then measured using flow cytometry. As shown in FIG. 17B, curons expressing miR-625 significantly downregulated YFP expression, whereas curons expressing the non-specific miRNA miR-124 did not affect YFP expression. These results show that the curon with miR-625 induced on-target downregulation of the YFP protein target.

[0711] The ability of curons expressing exogenous miRNAs to modulate host gene expression was also tested. SW-900 NSCLC cells were infected with Curons expressing either miR-518 or miR-625 or miR-scr at a dose of 10 genome equivalents per cell. Infected cells were harvested 72 hours post infection and total protein lysates were prepared. Immunoblot analysis was performed on these protein lysates to determine the levels of p65 protein. The intensity of p65 protein signal was normalized to the total amount of protein on the membrane for each sample (FIG. 17C). A reduction in p65 levels was observed, indicating that curons can modulate expression of a host gene.

### Example 23: Preparation and Production of Curons to Express Exogenous Non-Coding RNAs

[0712] This example describes the synthesis and production of curons to express exogenous small non-coding RNAs.

[0713] The DNA sequence from the tth8 strain of TTV (Jelcic et al, Journal of Virology, 2004) is synthesized and cloned into a vector containing the bacterial origin of replication and bacterial antibiotic resistance gene. In this vector, the DNA sequence encoding the TTV miRNA hairpin is replaced by a DNA sequence encoding an exogenous small non-coding RNA such as miRNA or shRNA. The engineered construct is then transformed into electro-competent bacteria, followed by plasmid isolation using a plasmid purification kit according to the manufacturer's protocols.

[0714] The curon DNA encoding the exogenous small non-coding RNAs is transfected into an eukaryotic producer cell line to produce curon particles. The supernatant of the transfected cells containing the curon particles is harvested at different time points post transfection. Curon particles, either from the filtered supernatant or after purification, are used for downstream applications, e.g., as described herein.

### Example 24: Conservation in Anellovirus Clades

[0715] This example describes the identification of five clades within the alphatorquevirus genus. The average pairwise identity within each clade generally ranges from 66 to 90% (FIG. 18). Representative sequences between these clades showed 57.2% pairwise identity across the sequences (FIG. 19). The pairwise identity is lowest among the open reading frames (˜51.4%), and higher in the non-coding regions (69.5% in the 5′ NCR, 72.6% in the 3′ NCR) (FIG. 19). This suggests that DNA sequences or structures in the non-coding regions play important roles in viral replication.

[0716] The amino acid sequences of the putative proteins in alphatorquevirus were also compared. The DNA sequences showed approximately 49 to 54% pairwise identity, while the amino acid sequences showed approximately 29 to 36% pairwise identity (FIG. 20). Interestingly, the representative sequences from the alphatorquevirus clades are able to successfully replicate in vivo and are observed in the human population. This suggests that the amino acid sequences for anellovirus proteins can vary widely while retaining functionalities such as replication and packaging.

[0717] Anelloviruses were found to have regions of local high conservation in the non-coding regions. In the region downstream of the promoter is a 71-bp 5′ UTR conserved domain that has 96.6% pairwise identity across the five alphatorquevirus clades (FIG. 21). Downstream of the open reading frames in the 3′ non-coding region of alphatorqueviruses, there is a 307 bp region with 85.2% pairwise identity between the representative sequences (FIG. 19). Near the 3′ end of this 3′ conserved non-coding region is a highly conserved 51 bp sequence with 96.5% pairwise identity. Each Anellovirus studied in this analysis also includes a GC-rich region, with greater than 70% GC content (FIG. 22).

### Example 25: Expression of an Endogenous miRNA from a Curon and Deletion of the Endogenous miRNA

[0718] In one example, curons based on the TTV-tth8 strain were used to infect Raji B cells in culture. These curons comprised a sequence encoding the endogenous payload of the TTV-tth8 Anellovirus, which is a miRNA targeting the mRNA encoding n-myc interacting protein (NMI). NMI operates downstream of the JAK/STAT pathway to regulate the transcription of various intracellular signals, including interferon-stimulated genes, proliferation and growth genes, and mediators of the inflammatory response. As shown in FIG. 23A, curons were able to successfully infect Raji B cells. Infection of cells with curons comprising the miRNA against NMI resulted in successful knockdown of NMI compared to control cells infected with curons lacking the miRNA against NMI (FIG. 23B). Cells infected with curon comprising the miRNA against NMI showed a greater than 75% reduction in NMI protein levels compared to control cells. This example demonstrates that a curon with a native Anellovirus miRNA can knock down a target molecule in host cells.

[0719] In another example, the endogenous miRNA of an Anellovirus-based curon was deleted. The resultant curon (A miR) was then used to infect host cells. Infection rate was compared to that of corresponding curons in which the endogenous miRNA was retained. As shown in FIG. 24, curons in which the endogenous miRNA were deleted were still able to infect cells at levels comparable to those observed for curons in which the endogenous miRNA was still present. This example demonstrates that the endogenous miRNA of an Anellovirus-based curon can be mutated, or deleted entirely, and still generate infectious particles.

The application's sequence listing, which the Patent Office published only in electronic form, follows.

SEQUENCE LISTING (749 sequences)

SEQ ID NO: 1 - DNA, 3570 bp, Torque teno virus
  source 1..3570: mol_type = other DNA
attttgtgcagcccgccaattctcgttcaaacaggccaatcaggaggctctacgtacacttcctggggtgtgtcttcgaagagtatataagcagaggcggtgacgaatggtagagtttttcctggcccgtccgcggcgagagcgcgagcggagcgagcgatcgagcgtcccgtgggcgggtgccgtaggtgagtttacacaccgcagtcaaggggcaattcgggctcgggactggccgggctatgggcaagattcttaaaaaattcccccgatccctctgtcgccaggacataaaaacatgccgtggagaccgccggtgcatagtgtccaggggcgagaggatcagtggttcgcgagcttttttcacggccacgcttcattttgcggttgcggtgacgctgttggccatcttaatagcattgctcctcgctttcctcgcgccggtccaccaaggccccctccggggctagagcagcctaaccccccgcagcagggcccggccgggcccggagggccgcccgccatcttggcgctgccggctccgcccgcggagcctgacgacccgcagccacggcgtggtggtggggacggtggcgccgccgctggcgccgcaggcgaccgtggagaccgagactacgacgaagaagagctagacgagcttttccgcgccgccgccgaagacgatttgtaagtaggagatggcgccggccttacaggcgcaggaggagacgcgggcgacgcagacgcagacgcagacgcagacataagcccaccctagtactcagacagtggcaacctgacgttatcagacactgtaagataacaggacggatgcccctcattatctgtggaaaggggtccacccagttcaactacatcacccacgcggacgacatcacccccaggggagcctcctacgggggcaacttcacaaacatgactttctccctggaggcaatatacgaacagtttctgtaccacagaaacaggtggtcagcctccaaccacgacctcgaactctgcagatacaagggtaccaccctaaaactgtacaggcacccagatgtagactacatagtcacctacagcagaacgggaccctttgagatcagccacatgacctacctcagcactcacccccttctcatgctgctaaacaaacaccacatagtggtgcccagcctaaagactaagcccaggggcagaaaggccataaaagtcagaataagaccccccaaactcatgaacaacaagtggtacttcaccagagacttctgtaacataggcctcttccagctctgggccacaggcttagaactcagaaacccctggctcagaatgagcaccctgagcccctgcataggcttcaatgtccttaaaaacagcatttacacaaacctcagcaacctacctcagcacagagaagacagacttaacattattaacaacacattacacccacatgacataacaggaccaaacaataaaaaatggcagtacacatataccaaactcatggcccccatttactattcagcaaacagggccagcacctatgacttactacgagagtatggcctctacagtccatactacctaaaccccacaaggataaaccttgactggatgaccccctacacacacgtcaggtacaatccactagtagacaagggcttcggaaacagaatatacatacagtggtgctcagaggcagatgtaagctacaacaggactaaatccaagtgtctcttacaagacatgcccctgtttttcatgtgctatggctacatagactgggcaattaaaaacacaggggtctcctcactagcgagagacgccagaatctgcatcaggtgtccctacacagagccacagctggtgggctccacagaagacatagggttcgtacccatcacagagaccttcatgaggggcgacatgccggtacttgcaccatacataccgttgagctggttttgcaagtggtatcccaacatagctcaccagaaggaagtacttgaggcaatcatttcctgcagccccttcatgccccgtgaccagggcatgaacggttgggatattacaataggttacaaaatggacttcttatggggcggttcccctctcccctcacagccaatcgacgacccctgccagcagggaacccacccgattcccgaccccgataagcaccctcgcctcctacaagtgtcgaacccgaaactgctcggaccgaggacagtgttccacaagtgggacatcagacgtgggcagtttagcaaaagaagtattaaaagagtgtcagaatactcatcggatgatgaatctcttgcgccaggtctcccatcaaagcgaaacaagctcgactcggccttcagaggagaaaacccagagcaaaaagaatgctattctctcctcaaagcactcgaggaagaagagaccccagaagaagaagaaccagcaccccaagaaaaagcccagaaagaggagctactccaccagctccagctccagagacgccaccagcgagtcctcagacgagggctcaagctcgtctttacagacatcctccgactccgccagggagtccactggaaccccgagctcacatagagcccccaccttacataccagacctactttttcccaatactggtaaaaaaaaaaaattctctcccttcgactgggaaacggaggcccagctagcagggatattcaagcgtcctatgcgcttctatccctcagacacccctcactacccgtggttaccccccaagcgcgatatcccgaaaatatgtaacataaacttcaaaataaagctgcaagagtgagtgattcgaggccctcctctgttcacttagcggtgtctacctcttaaagtcaccaagcactccgagcgtcagcgaggagtgcgaccctccaccaaggggcaacttcctcggggtccggcgctacgcgcttcgcgctgcgccggacgcctcggacccccccccgacccgaatcgctcgcgcgattcggacctgcggcctcggggggggtcgggggctttactaaacagactccgagttgccactggactcaggagctgtgaatcagtaacgaaagtgagtggggccagacttcgccatagggcctttaacttggggtcgtctgtcggtggcttccgggtccgcctgggcgccgccattttagctttagacgccattttaggccctcgcgggcacccgtaggcgcgttttaatgacgtcacggcagccattttgtcgtgacgtttgagacacgtgatgggggcgtgcctaaacccggaagcatccctggtcacgtgactctgacgtcacggcggccattttgtgctgtccgccatcttgtgacttccttccgctttttcaaaaaaaaagaggaagtatgacagtagcggcgggggggcggccgcgttcgcgcgccgcccaccagggggtgctgcgcgcccccccccgcgcatgcgcggggcccccccccgggggggctccgcccccccggcccccccccgtgctaaacccaccgcgcatgcgcgaccacgcccccgccgcc

SEQ ID NO: 2 - protein, 130 aa, Torque teno virus
MPWRPPVHSVQGREDQWFASFFHGHASFCGCGDAVGHLNSIAPRFPRAGPPRPPPGLEQPNPPQQGPAGPGGPPAILALPAPPAEPDDPQPRRGGGDGGAAAGAAGDRGDRDYDEEELDELFRAAAEDDL

SEQ ID NO: 3 - protein, 303 aa, Torque teno virus
MPWRPPVHSVQGREDQWFASFFHGHASFCGCGDAVGHLNSIAPRFPRAGPPRPPPGLEQPNPPQQGPAGPGGPPAILALPAPPAEPDDPQPRRGGGDGGAAAGAAGDRGDRDYDEEELDELFRAAAEDDFQSTTPASREPTRFPTPISTLASYKCRTRNCSDRGQCSTSGTSDVGSLAKEVLKECQNTHRMMNLLRQVSHQSETSSTRPSEEKTQSKKNAILSSKHSRKKRPQKKKNQHPKKKPRKRSYSTSSSSRDATSESSDEGSSSSLQTSSDSARESTGTPSSHRAPTLHTRPTFSQYW

SEQ ID NO: 4 - protein, 293 aa, Torque teno virus
MPWRPPVHSVQGREDQWFASFFHGHASFCGCGDAVGHLNSIAPRFPRAGPPRPPPGLEQPNPPQQGPAGPGGPPAILALPAPPAEPDDPQPRRGGGDGGAAAGAAGDRGDRDYDEEELDELFRAAAEDDLSPIKAKQARLGLQRRKPRAKRMLFSPQSTRGRRDPRRRRTSTPRKSPERGATPPAPAPETPPASPQTRAQARLYRHPPTPPGSPLEPRAHIEPPPYIPDLLFPNTGKKKKFSPFDWETEAQLAGIFKRPMRFYPSDTPHYPWLPPKRDIPKICNINFKIKLQE

SEQ ID NO: 5 - protein, 180 aa, Torque teno virus
MPWRPPVHSVQGREDQWSPIKAKQARLGLQRRKPRAKRMLFSPQSTRGRRDPRRRRTSTPRKSPERGATPPAPAPETPPASPQTRAQARLYRHPPTPPGSPLEPRAHIEPPPYIPDLLFPNTGKKKKFSPFDWETEAQLAGIFKRPMRFYPSDTPHYPWLPPKRDIPKICNINFKIKLQE

SEQ ID NO: 6 - protein, 680 aa, Torque teno virus
TAWWWGRWRRRWRRRRPWRPRLRRRRARRAFPRRRRRRFVSRRWRRPYRRRRRRGRRRRRRRRRHKPTLVLRQWQPDVIRHCKITGRMPLIICGKGSTQFNYITHADDITPRGASYGGNFTNMTFSLEAIYEQFLYHRNRWSASNHDLELCRYKGTTLKLYRHPDVDYIVTYSRTGPFEISHMTYLSTHPLLMLLNKHHIVVPSLKTKPRGRKAIKVRIRPPKLMNNKWYFTRDFCNIGLFQLWATGLELRNPWLRMSTLSPCIGFNVLKNSIYTNLSNLPQHREDRLNIINNTLHPHDITGPNNKKWQYTYTKLMAPIYYSANRASTYDLLREYGLYSPYYLNPTRINLDWMTPYTHVRYNPLVDKGFGNRIYIQWCSEADVSYNRTKSKCLLQDMPLFFMCYGYIDWAIKNTGVSSLARDARICIRCPYTEPQLVGSTEDIGFVPITETFMRGDMPVLAPYIPLSWFCKWYPNIAHQKEVLEAIISCSPFMPRDQGMNGWDITIGYKMDFLWGGSPLPSQPIDDPCQQGTHPIPDPDKHPRLLQVSNPKLLGPRTVFHKWDIRRGQFSKRSIKRVSEYSSDDESLAPGLPSKRNKLDSAFRGENPEQKECYSLLKALEEEETPEEEEPAPQEKAQKEELLHQLQLQRRHQRVLRRGLKLVFTDILRLRQGVHWNPELT

SEQ ID NO: 7 - protein, 197 aa, Torque teno virus
TAWWWGRWRRRWRRRRPWRPRLRRRRARRAFPRRRRRRFPIDDPCQQGTHPIPDPDKHPRLLQVSNPKLLGPRTVFHKWDIRRGQFSKRSIKRVSEYSSDDESLAPGLPSKRNKLDSAFRGENPEQKECYSLLKALEEEETPEEEEPAPQEKAQKEELLHQLQLQRRHQRVLRRGLKLVFTDILRLRQGVHWNPELT

SEQ ID NO: 8 - protein, 145 aa, Torque teno virus
TAWWWGRWRRRWRRRRPWRPRLRRRRARRAFPRRRRRRFVSHQSETSSTRPSEEKTQSKKNAILSSKHSRKKRPQKKKNQHPKKKPRKRSYSTSSSSRDATSESSDEGSSSSLQTSSDSARESTGTPSSHRAPTLHTRPTFSQYW

SEQ ID NO: 9 - DNA, 3794 bp, Torque teno virus
  source 1..3794: mol_type = other DNA
cccgaagtccgtcactaaccacgtgactcctgtcgcccaatcagagtgtatgtcgtgcatttcctgggcatggtctacatcctgatataactaagtgcacttccgaatggctgagttttccacgcccgtccgcagcgagggagcgacggaggagctcccgagcgtcccgagggcgggtgccggaggtgagtttacacaccgcagtcaaggggcaattcgggctcgggactggccgggctatgggcaaggctcttagggtcttcattcttaatatgtttcttggcagagtttaccgccacaagaaaaggaaagtgctactgtccacactgcgagctccacaggcgtctcgcagggctatgagttggcgacccccggtacacgatgcacccggcatcgagcgcaattggtacgaggcctgtttcagagcccacgctggagcttgtggctgtggcaattttattatgcaccttaatcttttggctgggcgttatggttttactccggggtcagcgccgccaggtggtcctcctccgggcaccccgcagataaggagagccaggcctagtcccgccgcaccagagcagcccgctgccctaccatggcatggggatggtggagatggcggcgccgctggcccgccagacgctggaggagacgccgtcgccggcgccccgtacggagaacaagagctcgccgacctgctcgacgctatagaagacgacgaacagtaagaaccaggcgaaggcggtgggggcgcagacggtacagacggggctggagacgcaggacttatgtgagaaaggggcgacacagaaaaaagaaaaagagactgatactgagacagtggcaaccagccacaagacgcagatgtaccataactgggtacctgcccatagtgttctgcggccacactaggggcaataaaaactatgcactacactctgacgactacaccccccaaggacaaccatttggaggggctctaagcactacctcattctctttaaaagtactatttgaccagcatcagagaggactaaacaagtggtcttttccaaacgaccaactagacctcgccagatatagaggctgcaaatttatattttatagaacaaaacaaactgactgggtgggccagtatgacatatcagaaccctacaagctagacaaatacagctgccccaactatcaccctggaaacatgattaaggcaaagcacaaatttttaataccaagctatgacactaatcctagaggcagacaaaaaattatagttaaaattccccccccagacctctttgtagacaagtggtacactcaagaggatctgtgttccgttaatcttgtgtcacttgcggtttctgcggcttcctttctccacccattcggctcaccacaaactgacaacccttgctacaccttccaggtgttgaaagagttctactatcaggcaataggcttctctgcaagcacacaagcaatgacatcagtattagacacgctatacacacaaaacagttattgggaatctaatctaactcagttttatgtacttaatgcaaaaaaaggcagtgatacaacacagcctttaactagcaatatgccaactcgtgaagagtttatggcaaaaaaaaataccaattacaactggtatacatacaaggccgcgtcagtaaaaaataaactacatcaaatgagacaaacctattttgaggagttaacctctaaggggccacaaacaacaaaaagtgaggaaggctacagtcagcactggaccaccccctccacaaacgcctacgaatatcacttaggaatgtttagtgcaatatttctagccccagacaggccagtacctagatttccatgcgcctaccaagatgtaacttacaaccccttaatggacaaaggggtgggaaaccacatttggtttcagtacaacacaaaggcagacactcagctaatagtcacaggagggtcctgcaaagcacacatacaagacataccactgtgggcggccttctatggatacagtgactttatagagtcagaactaggcccctttgtagatgcagagacggtaggcttagtgtgtgtaatatgcccttatacaaaaccccccatgtacaacaagacaaaccccgccatgggctacgtgttctatgacagaaactttggtgacggaaaatggactgacggacggggcaaaatagagccctactggcaagttaggtggaggcccgaaatgcttttccaagaaactgtaatggcagacctagttcagactgggccctttagctacaaagacgaacttaaaaacagcaccctagtgtgcaagtacaaattctatttcacctggggaggtaacatgatgttccaacagacgatcaaaaacccgtgcaagacggacggacaacccaccgactccagtagacaccctagaggaatacaagtggcggacccggaacaaatgggaccccgctgggtgttccactcctttgactggcgaaggggctatcttagcgagaaagctctcaaacgcctgcaagaaaaacctcttgactatgacgaatattttacacaaccaaaaagacctagaatctttcctccaacagaatcagcagagggagagttccgagagcccgaaaaaggctcgtattcagaggaagaaaggtcgcaagcctctgccgaagagcagacgcaggaggcgacagtactcctcctcaagcgacgactcagagagcaacagcagctccagcagcagctccaattcctcacccgagaaatgttcaaaacgcaagcgggtctccacctaaaccctatgttattaaaccagcgataaaccaagtgtacctgtttccagagagggccccaaaaccccctcctagcagccaagactggcagcaggagtacgaggcctgcgcagcctgggacaggccccctagatacaatctgtcctctcctcctttctaccccagctgcccttcaaaattctgtgtaaaattcagccttggctttaaataaatggcaactttactgtgcaaggccgtgggagtttcactggtcggtgtctacctctaaaggtcactaagcactccgagcgttagcgaggagtgcgacccttccccctgactcaacttcttcggagccgcgcgctacgccttcggctgcgcgcggcacctcagacccccgctcgtgctgacacgctcgcgcgtgtcagaccacttcgggctcgcgggggtcgggaattttgctaaacagactccgagttgctcttggacactgagggggcatatcagtaacgaaagtgagtggggccagacttcgccataaggcctttatcttcttgccattggatagtatcgagggttgccataggcttcgacctccattttaggccttccggactacaaaaatggccgttttagtgacgtcacggccgccattttaagtaaggcggaagcagctcggcgtacacaaaatggcggcggagcacttccggcttgcccaaaatggtgggcaacttcttccgggtcaaaggtcacagctacgtcacaagtcacgtggggagggttggcgtttaacccggaagccaatcctcttacgtggcctgtcacgtgacttgtacgtcacgaccaccattttgttttacaaaatggccgacttccttcctcttttttaaaaataacggttcggcggcggcgcgcgcgctacgcgcgcgcgccggggggctgccgccccccccccgcgcatgcgcggggcccccccccgcggggggctccgccccccggcccccc

SEQ ID NO: 10 - protein, 124 aa, Torque teno virus
MSWRPPVHDAPGIERNWYEACFRAHAGACGCGNFIMHLNLLAGRYGFTPGSAPPGGPPPGTPQIRRARPSPAAPEQPAALPWHGDGGDGGAAGPPDAGGDAVAGAPYGEQELADLLDAIEDDEQ

SEQ ID NO: 11 - protein, 267 aa, Torque teno virus
MSWRPPVHDAPGIERNWYEACFRAHAGACGCGNFIMHLNLLAGRYGFTPGSAPPGGPPPGTPQIRRARPSPAAPEQPAALPWHGDGGDGGAAGPPDAGGDAVAGAPYGEQELADLLDAIEDDEQRSKTRARRTDNPPTPVDTLEEYKWRTRNKWDPAGCSTPLTGEGAILARKLSNACKKNLLTMTNILHNQKDLESFLQQNQQRESSESPKKARIQRKKGRKPLPKSRRRRRQYSSSSDDSESNSSSSSSSNSSPEKCSKRKRVST

SEQ ID NO: 12 - protein, 257 aa, Torque teno virus
MSWRPPVHDAPGIERNWYEACFRAHAGACGCGNFIMHLNLLAGRYGFTPGSAPPGGPPPGTPQIRRARPSPAAPEQPAALPWHGDGGDGGAAGPPDAGGDAVAGAPYGEQELADLLDAIEDDEHRGRVPRARKRLVFRGRKVASLCRRADAGGDSTPPQATTQRATAAPAAAPIPHPRNVQNASGSPPKPYVIKPAINQVYLFPERAPKPPPSSQDWQQEYEACAAWDRPPRYNLSSPPFYPSCPSKFCVKFSLGFK

SEQ ID NO: 13 - protein, 150 aa, Torque teno virus
MSWRPPVHDAPGIERNCRGRVPRARKRLVFRGRKVASLCRRADAGGDSTPPQATTQRATAAPAAAPIPHPRNVQNASGSPPKPYVIKPAINQVYLFPERAPKPPPSSQDWQQEYEACAAWDRPPRYNLSSPPFYPSCPSKFCVKFSLGFK

SEQ ID NO: 14 - protein, 746 aa, Torque teno virus
MAWGWWRWRRRWPARRWRRRRRRRPVRRTRARRPARRYRRRRTVRTRRRRWGRRRYRRGWRRRTYVRKGRHRKKKKRLILRQWQPATRRRCTITGYLPIVFCGHTRGNKNYALHSDDYTPQGQPFGGALSTTSFSLKVLFDQHQRGLNKWSFPNDQLDLARYRGCKFIFYRTKQTDWVGQYDISEPYKLDKYSCPNYHPGNMIKAKHKFLIPSYDTNPRGRQKIIVKIPPPDLFVDKWYTQEDLCSVNLVSLAVSAASFLHPFGSPQTDNPCYTFQVLKEFYYQAIGFSASTQAMTSVLDTLYTQNSYWESNLTQFYVLNAKKGSDTTQPLTSNMPTREEFMAKKNTNYNWYTYKAASVKNKLHQMRQTYFEELTSKGPQTTKSEEGYSQHWTTPSTNAYEYHLGMFSAIFLAPDRPVPRFPCAYQDVTYNPLMDKGVGNHIWFQYNTKADTQLIVTGGSCKAHIQDIPLWAAFYGYSDFIESELGPFVDAETVGLVCVICPYTKPPMYNKTNPAMGYVFYDRNFGDGKWTDGRGKIEPYWQVRWRPEMLFQETVMADLVQTGPFSYKDELKNSTLVCKYKFYFTWGGNMMFQQTIKNPCKTDGQPTDSSRHPRGIQVADPEQMGPRWVFHSFDWRRGYLSEKALKRLQEKPLDYDEYFTQPKRPRIFPPTESAEGEFREPEKGSYSEEERSQASAEEQTQEATVLLLKRRLREQQQLQQQLQFLTREMFKTQAGLHLNPMLLNQR

SEQ ID NO: 15 - protein, 195 aa, Torque teno virus
MAWGWWRWRRRWPARRWRRRRRRRPVRRTRARRPARRYRRRRTTIKNPCKTDGQPTDSSRHPRGIQVADPEQMGPRWVFHSFDWRRGYLSEKALKRLQEKPLDYDEYFTQPKRPRIFPPTESAEGEFREPEKGSYSEEERSQASAEEQTQEATVLLLKRRLREQQQLQQQLQFLTREMFKTQAGLHLNPMLLNQR

SEQ ID NO: 16 - protein, 107 aa, Torque teno virus
MAWGWWRWRRRWPARRWRRRRRRRPVRRTRARRPARRYRRRRTQRESSESPKKARIQRKKGRKPLPKSRRRRRQYSSSSDDSESNSSSSSSSNSSPEKCSKRKRVST

SEQ ID NO: 17 - DNA, 3753 bp, Torque teno virus
  source 1..3753: mol_type = other DNA
tgctacgtcactaacccacgtgtcctctacaggccaatcgcagtctatgtcgtgcacttcctgggcatggtctacataattatataaatgcttgcacttccgaatggctgagtttttgctgcccgtccgcggagaggagccacggcaggggatccgaacgtcctgagggcgggtgccggaggtgagtttacacaccgaagtcaaggggcaattcgggctcaggactggccgggctttgggcaaggctcttaaaaatgcacttttctcgaataagcagaaagaaaaggaaagtgctactgctttgcgtgccagcagctaagaaaaaaccaactgctatgagcttctggaaacctccggtacacaatgtcacggggatccaacgcatgtggtatgagtcctttcaccgtggccacgcttctttttgtggttgtgggaatcctatacttcacattactgcacttgctgaaacatatggccatccaacaggcccgagaccttctgggccaccgggagtagaccccaacccccacatccgtagagccaggcctgccccggccgctccggagccctcacaggttgattcgagaccagccctgacatggcatggggatggtggaagcgacggaggcgctggtggttccggaagcggtggacccgtggcagacttcgcagacgatggcctcgatcagctcgtcgccgccctagacgacgaagagtaaggaggcgcagacggtggaggagggggagacgaaaaacaaggacttacagacgcaggagacgctttagacgcaggggacgaaaagcaaaacttataataaaactgtggcaacctgcagtaattaaaagatgcagaataaagggatacataccactgattataagtgggaacggtacctttgccacaaactttaccagtcacataaatgacagaataatgaaaggccccttcgggggaggacacagcactatgaggttcagcctctacattttgtttgaggagcacctcagacacatgaacttctggaccagaagcaacgataacctagagctaaccagatacttgggggcttcagtaaaaatatacaggcacccagaccaagactttatagtaatatacaacagaagaacccctctaggaggcaacatctacacagcaccctctctacacccaggcaatgccattttagcaaaacacaaaatattagtaccaagtttacagacaagaccaaagggtagaaaagcaattagactaagaatagcaccccccacactctttacagacaagtggtactttcaaaaggacatagccgacctcacccttttcaacatcatggcagttgaggctgacttgcggtttccgttctgctcaccacaaactgacaacacttgcatcagcttccaggtccttagttccgtttacaacaactacctcagtattaatacctttaataatgacaactcagactcaaagttaaaagaatttttaaataaagcatttccaacaacaggcacaaaaggaacaagtttaaatgcactaaatacatttagaacagaaggatgcataagtcacccacaactaaaaaaaccaaacccacaaataaacaaaccattagagtcacaatactttgcacctttagatgccctctggggagaccccatatactataatgatctaaatgaaaacaaaagtttgaacgatatcattgagaaaatactaataaaaaacatgattacataccatgcaaaactaagagaatttccaaattcataccaaggaaacaaggccttttgccacctaacaggcatatacagcccaccatacctaaaccaaggcagaatatctccagaaatatttggactgtacacagaaataatttacaacccttacacagacaaaggaactggaaacaaagtatggatggacccactaactaaagagaacaacatatataaagaaggacagagcaaatgcctactgactgacatgcccctatggactttactttttggatatacagactggtgtaaaaaggacactaataactgggacttaccactaaactacagactagtactaatatgcccttatacctttccaaaattgtacaatgaaaaagtaaaagactatgggtacatcccgtactcctacaaattcggagcgggtcagatgccagacggcagcaactacataccctttcagtttagagcaaagtggtaccccacagtactacaccagcaacaggtaatggaggacataagcaggagcgggccctttgcacctaaggtagaaaaaccaagcactcagctggtaatgaagtactgttttaactttaactggggcggtaaccctatcattgaacagattgttaaagaccccagcttccagcccacctatgaaatacccggtaccggtaacatccctagaagaatacaagtcatcgacccgcgggtcctgggaccgcactactcgttccggtcatgggacatgcgcagacacacatttagcagagcaagtattaagagagtgtcagaacaacaagaaacttctgaccttgtattctcaggcccaaaaaagcctcgggtcgacatcccaaaacaagaaacccaagaagaaagctcacattcactccaaagagaatcgagaccgtgggagaccgaggaagaaagcgagacagaagccctctcgcaagagagccaagaggtccccttccaacagcagttgcagcagcagtaccaagagcagctcaagctcagacagggaatcaaagtcctcttcgagcagctcataaggacccaacaaggggtccatgtaaacccatgcctacggtaggtcccaggcagtggctgtttccagagagaaagccagccccagctcctagcagtggagactgggccatggagtttctcgcagcaaaaatatttgataggccagttagaagcaaccttaaagataccccttactacccatatgttaaaaaccaatacaatgtctactttgaccttaaatttgaataaacagcagcttcaaacttgcaaggccgtgggagtttcactggtcggtgtctacctctaaaggtcactaagcactccgagcgtaagcgaggagtgcgaccctcccccctggaacaacttcttcggagtccggcgctacgccttcggctgcgccggacacctcagaccccccctccacccgaaacgcttgcgcgtttcggaccttcggcgtcgggggggtcgggagctttattaaacggactccgaagtgctcttggacactgagggggtgaacagcaacgaaagtgagtggggccagacttcgccataaggcctttatcttcttgccatttgtcagtgtccggggtcgccataggcttcgggctcgtttttaggccttccggactacaaaaatcgccattttggtgacgtcacggccgccatcttaagtagttgaggcggacggtggcgtgagttcaaaggtcaccatcagccacacctactcaaaatggtggacaatttcttccgggtcaaaggttacagccgccatgttaaaacacgtgacgtatgacgtcacggccgccattttgtgacacaagatggccgacttccttcctctttttcaaaaaaaagcggaagtgccgccgcggcggcggggggcggcgcgctgcgcgcgccgcccagtagggggagccatgcgcccccccccgcgcatgcgcggggcccccccccgcggggggctccgccccccggccccccccg

SEQ ID NO: 18 - protein, 127 aa, Torque teno virus
MSFWKPPVHNVTGIQRMWYESFHRGHASFCGCGNPILHITALAETYGHPTGPRPSGPPGVDPNPHIRRARPAPAAPEPSQVDSRPALTWHGDGGSDGGAGGSGSGGPVADFADDGLDQLVAALDDEE

SEQ ID NO: 19 - protein, 268 aa, Torque teno virus
MSFWKPPVHNVTGIQRMWYESFHRGHASFCGCGNPILHITALAETYGHPTGPRPSGPPGVDPNPHIRRARPAPAAPEPSQVDSRPALTWHGDGGSDGGAGGSGSGGPVADFADDGLDQLVAALDDEELLKTPASSPPMKYPVPVTSLEEYKSSTRGSWDRTTRSGHGTCADTHLAEQVLRECQNNKKLLTLYSQAQKSLGSTSQNKKPKKKAHIHSKENRDRGRPRKKARQKPSRKRAKRSPSNSSCSSSTKSSSSSDRESKSSSSSS

SEQ ID NO: 20 - protein, 276 aa, Torque teno virus
MSFWKPPVHNVTGIQRMWYESFHRGHASFCGCGNPILHITALAETYGHPTGPRPSGPPGVDPNPHIRRARPAPAAPEPSQVDSRPALTWHGDGGSDGGAGGSGSGGPVADFADDGLDQLVAALDDEEPKKASGRHPKTRNPRRKLTFTPKRIETVGDRGRKRDRSPLAREPRGPLPTAVAAAVPRAAQAQTGNQSPLRAAHKDPTRGPCKPMPTVGPRQWLFPERKPAPAPSSGDWAMEFLAAKIFDRPVRSNLKDTPYYPYVKNQYNVYFDLKFE

SEQ ID NO: 21 - protein, 167 aa, Torque teno virus
MSFWKPPVHNVTGIQRMWPKKASGRHPKTRNPRRKLTFTPKRIETVGDRGRKRDRSPLAREPRGPLPTAVAAAVPRAAQAQTGNQSPLRAAHKDPTRGPCKPMPTVGPRQWLFPERKPAPAPSSGDWAMEFLAAKIFDRPVRSNLKDTPYYPYVKNQYNVYFDLKFE

SEQ ID NO: 22 - protein, 743 aa, Torque teno virus
MAWGWWKRRRRWWFRKRWTRGRLRRRWPRSARRRPRRRRVRRRRRWRRGRRKTRTYRRRRRFRRRGRKAKLIIKLWQPAVIKRCRIKGYIPLIISGNGTFATNFTSHINDRIMKGPFGGGHSTMRFSLYILFEEHLRHMNFWTRSNDNLELTRYLGASVKIYRHPDQDFIVIYNRRTPLGGNIYTAPSLHPGNAILAKHKILVPSLQTRPKGRKAIRLRIAPPTLFTDKWYFQKDIADLTLFNIMAVEADLRFPFCSPQTDNTCISFQVLSSVYNNYLSINTFNNDNSDSKLKEFLNKAFPTTGTKGTSLNALNTFRTEGCISHPQLKKPNPQINKPLESQYFAPLDALWGDPIYYNDLNENKSLNDIIEKILIKNMITYHAKLREFPNSYQGNKAFCHLTGIYSPPYLNQGRISPEIFGLYTEIIYNPYTDKGTGNKVWMDPLTKENNIYKEGQSKCLLTDMPLWTLLFGYTDWCKKDTNNWDLPLNYRLVLICPYTFPKLYNEKVKDYGYIPYSYKFGAGQMPDGSNYIPFQFRAKWYPTVLHQQQVMEDISRSGPFAPKVEKPSTQLVMKYCFNFNWGGNPIIEQIVKDPSFQPTYEIPGTGNIPRRIQVIDPRVLGPHYSFRSWDMRRHTFSRASIKRVSEQQETSDLVFSGPKKPRVDIPKQETQEESSHSLQRESRPWETEEESETEALSQESQEVPFQQQLQQQYQEQLKLRQGIKVLFEQLIRTQQGVHVNPCLR

SEQ ID NO: 23 - protein, 194 aa, Torque teno virus
MAWGWWKRRRRWWFRKRWTRGRLRRRWPRSARRRPRRRRIVKDPSFQPTYEIPGTGNIPRRIQVIDPRVLGPHYSFRSWDMRRHTFSRASIKRVSEQQETSDLVFSGPKKPRVDIPKQETQEESSHSLQRESRPWETEEESETEALSQESQEVPFQQQLQQQYQEQLKLRQGIKVLFEQLIRTQQGVHVNPCLR

SEQ ID NO: 24 - protein, 113 aa, Torque teno virus
MAWGWWKRRRRWWFRKRWTRGRLRRRWPRSARRRPRRRRAQKSLGSTSQNKKPKKKAHIHSKENRDRGRPRKKARQKPSRKRAKRSPSNSSCSSSTKSSSSSDRESKSSSSSS

SEQ ID NO: 25 - DNA, 3853 bp, Torque teno virus
  source 1..3853: mol_type = other DNA
ggcttagtgcgtcaccacccacgtgacccgcctccgccaattaacaggtacttcgtacacttcctgggcgggcttataagactaatataagtagctgcacttccgaatggctgagttttccacgcccgtccgcagcggtgaagccacggagggagctcagcgcgtcccgagggcgggtgccggaggtgagtttacacaccgcagtcaaggggcaattcgggctcgggactggccgggctttgggcaaggctcttaaaaaagctatgtttattggcaggcactaccgaaagaaaagggcgctgctactgctatctgtgcattctacaaagacaaaagggaaacttctaatagctatgtggactcccccacgcaatgatcaacaataccttaactggcaatggtacacttctgtacttagctcccactctgctatgtgcgggtgttccgacgctatcgctcatcttaatcatcttgctaatctgcttcgtgccccgcaaaatccgcccccgcctgataatccaagacccctacccgtgcgagcactgcctgctcccccggctgcccacgaggcagccggtgatcgagcaccatggcctatgggtggtggaggagacgccggaggcgctggcgcaggtggagacgccgaccatggaggcgccgctggaggacccgcagacgcagacctgctagacgccgtggccgccgcagaaacgtaaggagacggcgcagagggaggtggagaaggaggtacaggaggtggaaaagaaagggcagacgtagaagaaaagcaaaaataataataagacagtggcagccaaactacagaagaagatgtaatatagtgggctacctccctatacttatctgtggtggaaatactgtttctagaaactatgccacacactcagacgatactaactatccaggaccctttgggggaggcatgaccacagacaaattcagccttagaatactatatgatgaatacaaaagatttatgaactactggacagcctcaaatgaggacctagatctctgtagatatctaggatgcactttttacttctttagacaccctgaagtagactttattataaaaataaacaccatgcccccattcttagatacaaccataacagcacctagcatacacccaggcctcatggccctagacaaaagagccagatggattccttctcttaaaaatagaccaggtaaaaaacactatataaaaattagagtaggggctcctaaaatgttcacagataaatggtaccctcaaacagacctctgtgacatgacactgctaactatctatgcaaccgcagcggatatgcaatatccgttcggctcaccactaactgacactgtggttgttaactcccaagttctgcaatccatgtatgatgaaacaattagcatattacctgatgaaaaaactaaaagaaatagccttcttacttctataagaagctacatacctttttataatactacacaaacaatagctcaattaaaaccatttgtagatgcaggaggacacacaacaggctcaacaacaactacatggggacaactattaaacacaactaaatttaccactaccacaacaaccacatacacataccctggcaccacaaatacagcagtaacatttataacagccaatgatacctggtacaggggaacagcatataaagataacattaaagatgtaccacaaaaagcagcacaattatactttcaaacaacacaaaaactactaggaaacacattccatggctcagatgaaacacttgaataccatgcaggcctatacagctctatctggctatcaccaggtagatcctactttgaaacaccaggtgcatacacagacattaaatataacccttttacagacagaggagaaggcaacatgctgtggatagactggctaagtaaaaaaaacatgaaatatgacaaagtgcaaagtaagtgcctagtagcagacctaccactgtgggcagcagcatatggttatgtagaattctgctctaaaagcacaggagacacaaacatacacatgaatgccagactactaataagaagtccttttacagacccccagctaatagtacacacagaccccactaaaggctttgtaccctattctttaaactttggaaatggtaaaatgccaggaggtagcagcaatgttcccataagaatgagagctaagtggtaccccactttatcccaccaacaagaagttctagaggccttagcacagtcaggaccctttgcttatcactcagacattaaaaaagtatctctaggcataaaataccgttttaagtggatctggggtggaaaccccgttcgccaacaggttgttagaaatccctgcaaggaaccccactcctcgggcaatagagtccctagaagcatacaaatcgttgacccgagatacaactcaccggaacttaccatccatgcctgggacttcagacgtggcttctttggcccgaaagctattcaaagaatgcaacaacaaccaactgctactgaatttttttcagcaggccgcaagagacccagaagggacacagaagtgtatcagtccgaccaagaaaaggagcaaaaagaaagctcgcttttccccccagtcaagctcctccgaagagtccccccgtgggaggactcggaacaggagcaaagcgggtcgcaaagctcagaggaagagacggcgaccctctcccagcagctcaaacagcagctgcagcagcagcgagtcttgggagtcaaactcagactcctgttcaaccaagtccaaaaaatccaacaaaatcaagatatcaaccctaccttgttaccaagggggggggatctagtatccttctttcaggctgtaccataaatatgtttccagaccctaaaccttactgcccctccagcaatgactggaaagaagagtatgaggcctgtaaatattgggatagacctcccagacacaaccttagagacccccccttttacccctgggcccctaaaaacaatccttgcaatgtaagctttaaacttggcttcaaataaactaggccgtgggagtttcacttgtcggtgtctacctctataagtcactaagcactccgagcgcagcgaggagtgcgacccttccccctggtgcaacgccctcggcggccgcgcgctacgccttcggctgcgcgcggcacctcggacccccgctcgtgctgacacgcttgcgcgtgtcagaccacttcgggctcgcgggggtcgggaaatttgctaaacagactccgagttgccattggacactgtagctatgaatcagtaacgaaagtgagtggggccagacttcgccataaggcctttatcttcttgccatttgtcagtattgggggtcgccataaactttgggctccattttaggccttccggactacaaaaatcgccatatttgtgacgtcagagccgccattttaagtcagctctggggaggcgtgacttccagttcaaaggtcatcctcaccataactggcacaaaatggccgccaacttcttccgggtcaaaggtcactgctacgtcataggtgacgtggggggggacctacttaaacacggaagtaggccccgacacgtcactgtcacgtgacagtacgtcacagccgccattttgttttacaaaatagccgacttccttcctcttttttaaaaaaaggcgccaaaaaaccgtcggcgggggggccgcgcgctgcgcgcgcggcccccgggggaggcacagcctcccccccccgcgcgcatgcgcgcgggtccccccccctccggggggctccgccccccggcccccccc

SEQ ID NO: 26 - protein, 120 aa, Torque teno virus
MWTPPRNDQQYLNWQWYTSVLSSHSAMCGCSDAIAHLNHLANLLRAPQNPPPPDNPRPLPVRALPAPPAAHEAAGDRAPWPMGGGGDAGGAGAGGDADHGGAAGGPADADLLDAVAAAET

SEQ ID NO: 27 - protein, 286 aa, Torque teno virus
MWTPPRNDQQYLNWQWYTSVLSSHSAMCGCSDAIAHLNHLANLLRAPQNPPPPDNPRPLPVRALPAPPAAHEAAGDRAPWPMGGGGDAGGAGAGGDADHGGAAGGPADADLLDAVAAAETLLEIPARNPTPRAIESLEAYKSLTRDTTHRNLPSMPGTSDVASLARKLFKECNNNQLLLNFFQQAARDPEGTQKCISPTKKRSKKKARFSPQSSSSEESPRGRTRNRSKAGRKAQRKRRRPSPSSSNSSCSSSESWESNSDSCSTKSKKSNKIKISTLPCYQGGGI

SEQ ID NO: 28 - protein, 289 aa, Torque teno virus
MWTPPRNDQQYLNWQWYTSVLSSHSAMCGCSDAIAHLNHLANLLRAPQNPPPPDNPRPLPVRALPAPPAAHEAAGDRAPWPMGGGGDAGGAGAGGDADHGGAAGGPADADLLDAVAAAETPQETQKGHRSVSVRPRKGAKRKLAFPPSQAPPKSPPVGGLGTGAKRVAKLRGRDGDPLPAAQTAAAAAASLGSQTQTPVQPSPKNPTKSRYQPYLVTKGGGSSILLSGCTINMFPDPKPYCPSSNDWKEEYEACKYWDRPPRHNLRDPPFYPWAPKNNPCNVSFKLGFK

SEQ ID NO: 29 - protein, 185 aa, Torque teno virus
MWTPPRNDQQYLNWQWPQETQKGHRSVSVRPRKGAKRKLAFPPSQAPPKSPPVGGLGTGAKRVAKLRGRDGDPLPAAQTAAAAAASLGSQTQTPVQPSPKNPTKSRYQPYLVTKGGGSSILLSGCTINMFPDPKPYCPSSNDWKEEYEACKYWDRPPRHNLRDPPFYPWAPKNNPCNVSFKLGFK

SEQ ID NO: 30 - protein, 769 aa, Torque teno virus
MAYGWWRRRRRRWRRWRRRPWRRRWRTRRRRPARRRGRRRNVRRRRRGRWRRRYRRWKRKGRRRRKAKIIIRQWQPNYRRRCNIVGYLPILICGGNTVSRNYATHSDDTNYPGPFGGGMTTDKFSLRILYDEYKRFMNYWTASNEDLDLCRYLGCTFYFFRHPEVDFIIKINTMPPFLDTTITAPSIHPGLMALDKRARWIPSLKNRPGKKHYIKIRVGAPKMFTDKWYPQTDLCDMTLLTIYATAADMQYPFGSPLTDTVVVNSQVLQSMYDETISILPDEKTKRNSLLTSIRSYIPFYNTTQTIAQLKPFVDAGGHTTGSTTTTWGQLLNTTKFTTTTTTTYTYPGTTNTAVTFITANDTWYRGTAYKDNIKDVPQKAAQLYFQTTQKLLGNTFHGSDETLEYHAGLYSSIWLSPGRSYFETPGAYTDIKYNPFTDRGEGNMLWIDWLSKKNMKYDKVQSKCLVADLPLWAAAYGYVEFCSKSTGDTNIHMNARLLIRSPFTDPQLIVHTDPTKGFVPYSLNFGNGKMPGGSSNVPIRMRAKWYPTLSHQQEVLEALAQSGPFAYHSDIKKVSLGIKYRFKWIWGGNPVRQQVVRNPCKEPHSSGNRVPRSIQIVDPRYNSPELTIHAWDFRRGFFGPKAIQRMQQQPTATEFFSAGRKRPRRDTEVYQSDQEKEQKESSLFPPVKLLRRVPPWEDSEQEQSGSQSSEEETATLSQQLKQQLQQQRVLGVKLRLLFNQVQKIQQNQDINPTLLPRGGDLVSFFQAVP

SEQ ID NO: 31 - protein, 216 aa, Torque teno virus
MAYGWWRRRRRRWRRWRRRPWRRRWRTRRRRPARRRGRRRNVVRNPCKEPHSSGNRVPRSIQIVDPRYNSPELTIHAWDFRRGFFGPKAIQRMQQQPTATEFFSAGRKRPRRDTEVYQSDQEKEQKESSLFPPVKLLRRVPPWEDSEQEQSGSQSSEEETATLSQQLKQQLQQQRVLGVKLRLLFNQVQKIQQNQDINPTLLPRGGDLVSFFQAVP

SEQ ID NO: 32 - protein, 143 aa, Torque teno virus
MAYGWWRRRRRRWRRWRRRPWRRRWRTRRRRPARRRGRRRNAARDPEGTQKCISPTKKRSKKKARFSPQSSSSEESPRGRTRNRSKAGRKAQRKRRRPSPSSSNSSCSSSESWESNSDSCSTKSKKSNKIKISTLPCYQGGGI

SEQ ID NO: 33 - DNA, 3758 bp, Torque teno virus
  source 1..3758: mol_type = other DNA
aaagtacgtcactaaccacgtgactcccacaggccaaccacagtctacgtcgtgcatttcctgggcatggtctacatcataatataagaaggcgcacttccgaatggctgagttttccacgcccgtccgcagcgagaacgccacggagggagatcctcgcgtcccgagggcgggtgccggaggtgagtttacacaccgcagtcaaggggcaattcgggctcgggactggccgggccctgggcaaggctcttaaaaaatgcgctttcgcagggttgcggagaaaaggaaagtgcttctgcaaactctgcgagctgcaaagcaggctaggcggcttctaggtatgtggcagccccccgcgcacaatgtccccggcatcgagagaaactggtacgagagctgcttcaggtctcacgctgctgtttgtggctgtggcgactttgttggccatattaatcatttggcaactactctgggtcgtcctccgcgtcctgggcccccaggcggaccccgcacgccgcaaataagaaacctgccagcgctcccggcgccccagggcgagcccggtgacagagcgccatggcgtggggtttctggggccgacgccgccggtggagacggtggagagcgcggcgcagacggtggagaccccggagacgtaggagacgacgccctgctcgccgctttcgagctcgtcgaagagtaaggagacgcggggggaggtggcgcagacgctacagaaaatggcgacggggcagacgcagacggactcacagaaaaaagataattataaaacagtggcaaccaaactttattagacgctgctacataataggatgcctacctctcgttttctgtggcgaaaatacaaccgcccagaactatgccactcactcagacgatatgataagcaaaggaccgtacggggggggcatgactaccacgaaattcactctgagaatactgtacgacgagtttaccaggtttatgaacttttggactgtcagtaacgaagacctagacctgtgtagatacgtgggctgcaaactgatattttttaaacaccccacggtggactttatggtacagataaacactcagcctcctttcttagacacaagcctcaccgcggccagcatacacccgggcatcatgatgctcagcaagagacgcatattaataccctctctaaagacccggccgagcagaaaacacagggtggtcgtcagggtgggcgccccaagactttttcaggacaagtggtacccccagtcagacctatgtgacacagttctgctttccatatttgcaaccgcccgcgacttgcaatatccgttcggctcaccactaactgacaacccttgcgtcaacttccagatcctggggccccagtacaaaaaacaccttagtattagctccactatggatgatactaacaaacagcactataacagcaacttatttaataaaactgcactatacaacacctttcaaaccatagcccggcttaaagagacaggacaaactgcaaacattagtccaagttggagtgaagtacaaaacacaaaactactagatcacacaggtgctaatgcaactgccagcagagacacttggtacaagggaaacacatacaatgactacatacaacagttagcagagaaaacaagagaaaggtttaaaaaagcaacaatgtcagcactaccaaactaccccacaataatgtccacagacttatacgaataccactcaggcatatactccagcatatttctatcagctggcaggagctactttgaaaccactggggcctactctgacattatatacaaccctttgacagacaaaggcacaggcaacataatctggatagactaccttacaaaagacgacacaatctttgtaaaaaacaaaagcaaatgtgagataatggacatgcccctgtgggcggccggcacaggatacacagagttttgtgcaaagtacacaggagactctgccattatttacaatgccagaatactcataagatgcccatacactgaacccatgctaatagaccactcagacccaaacaaaggctttgtaccgtactcatttaactttggcaacggaaagatgccgggaggcagctccaacgtgcccataagaatgagagccaagtggtacgtaaacatattccaccaaaaagaagtattggagagcatagtacagtccggaccgttcgggtacaggggcgacataaaatcagctgtactgtccatgaaatacagatttcactggaaatggggcggaaaccctatatccaaacaggtcgtcaggaatccctgctccaactccagcacctccgcggcccatagaggacctcgcagcgtacaagcggttgacccgaaatacaataccccagaagtcacttggcactcgtgggacatcagacgaggactctttggcaaagcaggtattaaaagaatgcaacaagaatcagatgctctttacgttcctgcaggaccactcaagaggcctcgcagagacaccaacgcccaagacccggaaaagcaaaacgaaagctcacgtttcggagtccagcagcgactcccgtgggtccactccagccaagagacgcaaagctccgaagaagagacgcaggcgcaggggtcggtacaagaccaactactcctccagctccgagagcagcgagtactccgactccagctccaacaactcgcaccccaagtcctcaaagttcaagcaggacacagcctacaccccctattatcctcccaagcataaacaaagcctatatgtttgaaccccagggtcctaaacccatacaggggtacaacgattggctagaggagtacactagttgcaagttccgggacagacccccgagaatgctacacacagacttacccttttacccctgggcaccaaaaccccaagaccaagtcagggtaacctttaaactcaactttcaataaaaattctaggccgtgggactttcacttgtcggtgtctgcttcttaaggtcgccaagcactccgagcgtcagcgaggagtgcgaccccccccctcggtagcaacgccttcggagccgcgcgctacgccttcggctgcgcgcggcacctcagaccccccctccacccgaaacgcttgcgcgtttcggaccttcggcgtcgggggggtcgggagctttattaaacagactccgagttgccattggacactggagctgtgaatcagtaacgaaagtgagtggggccagacttcgccatagggcctttatcttctcgccattggatagtgtccggggttgccgtaggcttcggcctcgtttttaggccttccggactacaaaaatggcggattttgtgacgtcacggccgccattttaagtaaggcggaagcagctccaccctctcacataatggcggcggagcactcccggcttgcccaaaatggcgggcaagctcttccgggtcaaaggttggcagctacgtcacaagtcacctgactggggaggagttacatcccggaagttctcctcggtcacgtgactgtacacgtgactgctacgtcattgacgccatcttgtgtcacaaaatggcggtgcacttccgcttttttgaaaaaaggcgcgaaaaaacggcggcggcggcgcgcgcgctgcgcgcgcgcgccgggggggcgccagcgcccccccccccgcgcatgcacgggtccccccccccacggggggctccgccccccggccccccccc

SEQ ID NO: 34 - protein, 120 aa, Torque teno virus
MWQPPAHNVPGIERNWYESCFRSHAAVCGCGDFVGHINHLATTLGRPPRPGPPGGPRTPQIRNLPALPAPQGEPGDRAPWRGVSGADAAGGDGGERGADGGDPGDVGDDALLAAFELVEE

SEQ ID NO: 35 - protein, 284 aa, Torque teno virus
MWQPPAHNVPGIERNWYESCFRSHAAVCGCGDFVGHINHLATTLGRPPRPGPPGGPRTPQIRNLPALPAPQGEPGDRAPWRGVSGADAAGGDGGERGADGGDPGDVGDDALLAAFELVEESSGIPAPTPAPPRPIEDLAAYKRLTRNTIPQKSLGTRGTSDEDSLAKQVLKECNKNQMLFTFLQDHSRGLAETPTPKTRKSKTKAHVSESSSDSRGSTPAKRRKAPKKRRRRRGRYKTNYSSSSESSEYSDSSSNNSHPKSSKFKQDTAYTPYYPPKHKQSLYV

SEQ ID NO: 36 - protein, 277 aa, Torque teno virus
MWQPPAHNVPGIERNWYESCFRSHAAVCGCGDFVGHINHLATTLGRPPRPGPPGGPRTPQIRNLPALPAPQGEPGDRAPWRGVSGADAAGGDGGERGADGGDPGDVGDDALLAAFELVEETTQEASQRHQRPRPGKAKRKLTFRSPAATPVGPLQPRDAKLRRRDAGAGVGTRPTTPPAPRAASTPTPAPTTRTPSPQSSSRTQPTPPIILPSINKAYMFEPQGPKPIQGYNDWLEEYTSCKFRDRPPRMLHTDLPFYPWAPKPQDQVRVTFKLNFQ

SEQ ID NO: 37 - protein, 173 aa, Torque teno virus
MWQPPAHNVPGIERNWTTQEASQRHQRPRPGKAKRKLTFRSPAATPVGPLQPRDAKLRRRDAGAGVGTRPTTPPAPRAASTPTPAPTTRTPSPQSSSRTQPTPPIILPSINKAYMFEPQGPKPIQGYNDWLEEYTSCKFRDRPPRMLHTDLPFYPWAPKPQDQVRVTFKLNFQ

SEQ ID NO: 38 - protein, 736 aa, Torque teno virus
MAWGFWGRRRRWRRWRARRRRWRPRRRRRRRPARRFRARRRVRRRGGRWRRRYRKWRRGRRRRTHRKKIIIKQWQPNFIRRCYIIGCLPLVFCGENTTAQNYATHSDDMISKGPYGGGMTTTKFTLRILYDEFTRFMNFWTVSNEDLDLCRYVGCKLIFFKHPTVDFMVQINTQPPFLDTSLTAASIHPGIMMLSKRRILIPSLKTRPSRKHRVVVRVGAPRLFQDKWYPQSDLCDTVLLSIFATARDLQYPFGSPLTDNPCVNFQILGPQYKKHLSISSTMDDTNKQHYNSNLFNKTALYNTFQTIARLKETGQTANISPSWSEVQNTKLLDHTGANATASRDTWYKGNTYNDYIQQLAEKTRERFKKATMSALPNYPTIMSTDLYEYHSGIYSSIFLSAGRSYFETTGAYSDIIYNPLTDKGTGNIIWIDYLTKDDTIFVKNKSKCEIMDMPLWAAGTGYTEFCAKYTGDSAIIYNARILIRCPYTEPMLIDHSDPNKGFVPYSFNFGNGKMPGGSSNVPIRMRAKWYVNIFHQKEVLESIVQSGPFGYRGDIKSAVLSMKYRFHWKWGGNPISKQVVRNPCSNSSTSAAHRGPRSVQAVDPKYNTPEVTWHSWDIRRGLFGKAGIKRMQQESDALYVPAGPLKRPRRDTNAQDPEKQNESSRFGVQQRLPWVHSSQETQSSEEETQAQGSVQDQLLLQLREQRVLRLQLQQLAPQVLKVQAGHSLHPLLSSQA

SEQ ID NO: 39 - protein, 199 aa, Torque teno virus
MAWGFWGRRRRWRRWRARRRRWRPRRRRRRRPARRFRARRRVVRNPCSNSSTSAAHRGPRSVQAVDPKYNTPEVTWHSWDIRRGLFGKAGIKRMQQESDALYVPAGPLKRPRRDTNAQDPEKQNESSRFGVQQRLPWVHSSQETQSSEEETQAQGSVQDQLLLQLREQRVLRLQLQQLAPQVLKVQAGHSLHPLLSSQA

SEQ ID NO: 40 - protein, 141 aa, Torque teno virus
MAWGFWGRRRRWRRWRARRRRWRPRRRRRRRPARRFRARRRDHSRGLAETPTPKTRKSKTKAHVSESSSDSRGSTPAKRRKAPKKRRRRRGRYKTNYSSSSESSEYSDSSSNNSHPKSSKFKQDTAYTPYYPPKHKQSLYV

SEQ ID NO: 41 - DNA, 2979 bp, TTV-like mini virus
  source 1..2979: mol_type = other DNA
taataaatattcaacaggaaaaccacctaatttaaattgccgaccacaaaccgtcacttagttcccctttttgcaacaacttctgcttttttccaactgccggaaaaccacataatttgcatggctaaccacaaactgatatgctaattaacttccacaaaacaacttccccttttaaaaccacacctacaaattaattattaaacacagtcacatcctgggaggtactaccacactataataccaagtgcacttccgaatggctgagtttatgccgctagacggagaacgcatcagttactgactgcggactgaacttgggcgggtgccgaaggtgagtgaaaccaccgaagtcaaggggcaattcgggctagttcagtctagcggaacgggcaagaaacttaaaattattttatttttcagatgagcgactgctttaaaccaacatgctacaacaacaaaacaaagcaaactcactggattaataacctgcatttaacccacgacctgatctgcttctgcccaacaccaactagacacttattactagctttagcagaacaacaagaaacaattgaagtgtctaaacaagaaaaagaaaaaataacaagatgccttattactacagaagaagacggtacaactacagacgtcctagatggtatggacgaggttggattagacgcccttttcgcagaagatttcgaagaaaaagaagggtaagacctacttatactactattcctctaaagcaatggcaaccgccatataaaagaacatgctatataaaaggacaagactgtttaatatactatagcaacttaagactgggaatgaatagtacaatgtatgaaaaaagtattgtacctgtacattggccgggagggggttctttttctgtaagcatgttaactttagatgccttgtatgatatacataaactttgtagaaactggtggacatccacaaaccaagacttaccactagtaagatataaaggatgcaaaataacattttatcaaagcacatttacagactacatagtaagaatacatacagaactaccagctaacagtaacaaactaacatacccaaacacacatccactaatgatgatgatgtctaagtacaaacacattatacctagtagacaaacaagaagaaaaaagaaaccatacacaaaaatatttgtaaaaccacctccgcaatttgaaaacaaatggtactttgctacagacctctacaaaattccattactacaaatacactgcacagcatgcaacttacaaaacccatttgtaaaaccagacaaattatcaaacaatgttacattatggtcactaaacaccataagcatacaaaatagaaacatgtcagtggatcaaggacaatcatggccatttaaaatactaggaacacaaagcttttatttttacttttacaccggagcaaacctaccaggtgacacaacacaaataccagtagcagacctattaccactaacaaacccaagaataaacagaccaggacaatcactaaatgaggcaaaaattacagaccatattactttcacagaatacaaaaacaaatttacaaattattggggtaacccatttaataaacacattcaagaacacctagatatgatactatactcactaaaaagtccagaagcaataaaaaacgaatggacaacagaaaacatgaaatggaaccaattaaacaatgcaggaacaatggcattaacaccatttaacgagccaatattcacacaaatacaatataacccagatagagacacaggagaagacactcaattatacctactctctaacgctacaggaacaggatgggacccaccaggaattccagaattaatactagaaggatttccactatggttaatatattggggatttgcagactttcaaaaaaacctaaaaaaagtaacaaacatagacacaaattacatgttagtagcaaaaacaaaatttacacaaaaacctggcacattctacttagtaatactaaatgacacctttgtagaaggcaatagcccatatgaaaaacaacctttacctgaagacaacattaaatggtacccacaagtacaataccaattagaagcacaaaacaaactactacaaactgggccatttacaccaaacatacaaggacaactatcagacaatatatcaatgttttataaattttactttaaatggggaggaagcccaccaaaagcaattaatgttgaaaatcctgcccaccagattcaatatcccataccccgtaacgagcatgaaacaacttcgttacagagtccaggggaagccccagaatccatcttatactccttcgactatagacacgggaactacacaacaacagctttgtcacgaattagccaagactgggcacttaaagacactgtttctaaaattacagagccagatcgacagcaactgctcaaacaagccctcgaatgcctgcaaatctcggaagaaacgcaggagaaaaaagaaaaagaagtacagcagctcatcagcaacctcagacagcagcagcagctgtacagagagcgaataatatcattattaaaggaccaataacttttaactgtgtaaaaaaggtgaaattgtttgatgataaaccaaaaaaccgtagatttacacctgaggaatttgaaactgagttacaaatagcaaaatggttaaagagacccccaagatcctttgtaaatgatcctcccttttacccatggttaccacctgaacctgttgtaaactttaagcttaattttactgaataaaggccagcattaattcacttaaggagtctgtttatttaagttaaaccttaataaacggtcaccgcctccctaatacgcaggcgcagaaagggggctccgccccctttaacccccagggggctccgccccctgaaacccccaagggggctacgcccccttacaccccc

SEQ ID NO: 42 - protein, 99 aa, TTV-like mini virus
MSDCFKPTCYNNKTKQTHWINNLHLTHDLICFCPTPTRHLLLALAEQQETIEVSKQEKEKITRCLITTEEDGTTTDVLDGMDEVGLDALFAEDFEEKEG

SEQ ID NO: 43 - protein, 203 aa, TTV-like mini virus
MSDCFKPTCYNNKTKQTHWINNLHLTHDLICFCPTPTRHLLLALAEQQETIEVSKQEKEKITRCLITTEEDGTTTDVLDGMDEVGLDALFAEDFEEKEGFNIPYPVTSMKQLRYRVQGKPQNPSYTPSTIDTGTTQQQLCHELAKTGHLKTLFLKLQSQIDSNCSNKPSNACKSRKKRRRKKKKKYSSSSATSDSSSSCTESE

SEQ ID NO: 44 - protein, 219 aa, TTV-like mini virus
MSDCFKPTCYNNKTKQTHWINNLHLTHDLICFCPTPTRHLLLALAEQQETIEVSKQEKEKITRCLITTEEDGTTTDVLDGMDEVGLDALFAEDFEEKEGARSTATAQTSPRMPANLGRNAGEKRKRSTAAHQQPQTAAAAVQRANNIIIKGPITFNCVKKVKLFDDKPKNRRFTPEEFETELQIAKWLKRPPRSFVNDPPFYPWLPPEPVVNFKLNFTE

SEQ ID NO: 45 - protein, 666 aa, TTV-like mini virus
MPYYYRRRRYNYRRPRWYGRGWIRRPFRRRFRRKRRVRPTYTTIPLKQWQPPYKRTCYIKGQDCLIYYSNLRLGMNSTMYEKSIVPVHWPGGGSFSVSMLTLDALYDIHKLCRNWWTSTNQDLPLVRYKGCKITFYQSTFTDYIVRIHTELPANSNKLTYPNTHPLMMMMSKYKHIIPSRQTRRKKKPYTKIFVKPPPQFENKWYFATDLYKIPLLQIHCTACNLQNPFVKPDKLSNNVTLWSLNTISIQNRNMSVDQGQSWPFKILGTQSFYFYFYTGANLPGDTTQIPVADLLPLTNPRINRPGQSLNEAKITDHITFTEYKNKFTNYWGNPFNKHIQEHLDMILYSLKSPEAIKNEWTTENMKWNQLNNAGTMALTPFNEPIFTQIQYNPDRDTGEDTQLYLLSNATGTGWDPPGIPELILEGFPLWLIYWGFADFQKNLKKVTNIDTNYMLVAKTKFTQKPGTFYLVILNDTFVEGNSPYEKQPLPEDNIKWYPQVQYQLEAQNKLLQTGPFTPNIQGQLSDNISMFYKFYFKWGGSPPKAINVENPAHQIQYPIPRNEHETTSLQSPGEAPESILYSFDYRHGNYTTTALSRISQDWALKDTVSKITEPDRQQLLKQALECLQISEETQEKKEKEVQQLISNLRQQQQLYRERIISLLKDQ

SEQ ID NO: 46 - protein, 148 aa, TTV-like mini virus
MPYYYRRRRYNYRRPRWYGRGWIRRPFRRRFRRKRRIQYPIPRNEHETTSLQSPGEAPESILYSFDYRHGNYTTTALSRISQDWALKDTVSKITEPDRQQLLKQALECLQISEETQEKKEKEVQQLISNLRQQQQLYRERIISLLKDQ

SEQ ID NO: 47 - protein, 82 aa, TTV-like mini virus
MPYYYRRRRYNYRRPRWYGRGWIRRPFRRRFRRKRRSQIDSNCSNKPSNACKSRKKRRRKKKKKYSSSSATSDSSSSCTESE

SEQ ID NO: 48 - DNA, 3242 bp, Torque teno midi virus 1
  source 1..3242: mol_type = other DNA
aggtggagactcttaagctatataaccaagtggggtggcgaatggctgagtttaccccgctagacggtgcagggaccggatcgagcgcagcgaggaggtccccggctgcccgtgggcgggagcccgaggtgagtgaaaccaccgaggtctaggggcaattcgggctagggcagtctagcggaacgggcaagaaacttaaaaatatttcttttacagatgcaaaacctatcagccaaagacttctacaaaccatgcagatacaactgtgaaactaaaaaccaaatgtggatgtctggcattgctgactcccatgacagttggtgtgactgtgatactccttttgctcacctcctggctagtatttttcctcctggtcacacagatcgcacacgaaccatccaagaaatacttaccagagattttaggaaaacatgcctttctggtggggccgacgcaacaaattctggtatggccgaaactatagaagaaaaaagagaagatttccaaaaagaagaaaaagaagattttacagaagaacaaaatatagaagacctgctcgccgccgtcgcagacgcagaaggaaggtaagaagaaaaaaaaaaactcttatagtaagacaatggcagccagactctattgtactctgtaaaattaaagggtatgactctataatatggggagctgaaggcacacagtttcaatgttctacacatgaaatgtatgaatatacaagacaaaagtaccctgggggaggaggatttggtgtacaactttacagcttagagtatttgtatgaccaatggaaacttagaaataatatatggactaaaacaaatcaactcaaagatttgtgtagatacttaaaatgtgttatgaccttttacagacaccaacacatagattttgtaattgtatatgaaagacaacccccatttgaaatagataaactaacatacatgaaatatcatccatatatgttattacaaagaaagcataaaataattttacctagtcaaacaactaatcctagaggtaaattaaaaaaaaagaaaactattaaacctcccaaacaaatgctcagcaaatggttttttcaacaacaatttgctaaatatgatctactacttattgctgcagcagcatgtagtttaagataccctagaataggctgctgcaatgaaaatagaatgataaccttatactgtttaaatactaaattttatcaagatacagaatggggaactacaaaacaggccccccactactttaaaccatatgcaacaattaataaatccatgatatttgtctctaactatggaggtaaaaaaacagaatataacataggccaatggatagaaacagatatacctggagaaggtaatctagcaagatactacagatcaataagtaaagaaggaggttacttttcacctaaaatactgcaagcatatcaaacaaaagtaaagtctgtagactacaaacctttaccaattgttttaggtagatataacccagcaatagatgatggaaaaggcaacaaaatttacttacaaactataatgaatggccattggggcctacctcaaaaaacaccagattatataatagaagaggtccctctttggctaggcttctggggatactataactacttaaaacaaacaagaactgaagctatatttccactacacatgtttgtagtgcaaagcaaatacattcaaacacaacaaacagaaacacctaacaatttttgggcatttatagacaacagctttatacagggcaaaaacccatgggactcagttattacttactcagaacaaaagctatggtttcctacagttgcatggcaactaaaaaccataaatgctatttgtgaaagtggaccatatgtacctaaactagacaatcaaacatatagtacctgggaactagcaactcattactcatttcactttaaatggggtggtccacagatatcagaccaaccagttgaagacccaggaaacaaaaacaaatatgatgtgcccgatacaatcaaagaagcattacaaattgttaacccagcaaaaaacattgctgccacgatgttccatgactgggactacagacggggttgcattacatcaacagctattaaaagaatgcaacaaaacctcccaactgattcatctctcgaatctgattcagactcagaaccagcacccaagaaaaaaagactactaccagtcctccacgacccacaaaagaaaacggaaaagatcaaccaatgtctcctctctctctgcgaagaaagtacatgccaggagcaggaaacggaggaaaacatcctcaagctcatccagcagcagcagcagcagcagcagaaactcaagcacaacctcttagtactaatcaaggacttaaaagtgaaacaaagattattacaactacaaacgggggtactagaataacccttaccagatttaaaccaggatttgagcaagaaactgaaaaagagttagcacaagcatttaacagaccccctagactgttcaaagaagataaacccttttacccctggctacccagatttacaccccttgtaaactttcaccttaattttaaaggctaggcctacactgctcacttagtggtgtatgtttattaaagtttgcaccccagaaaaattgtaaaataaaaaaaaaaaaaaaaaataaaaaattgcaaaaattcggcgctcgcgcgcgctgcgcgcgcgagcgccgtcacgcgccggcgctcgcgcgccgcgcgtatgtgctaacacaccacgcacctagattggggtgcgcgcgtagcgcgcgcaccccaatgcgccccgccctcgttccgacccgcttgcgcgggtcggaccacttcgggctcgggggggcgcgcctgcggcgcttatttactaaacagactccgagtcgccattgggccccccctaagctccgcccccctcatgaatattcataaaggaaaccacaaaattagaattgccgaccacaaactgccatatgctaattagttccccttttacacagtaaaaaggggaagtgggggggcagagcccccccacaccccccgcggggggggcagagccccccccgcaccccccctacgtcacaggccacgcccccgccgccatcttgggtgcggcagggcggggactaaaatggcgggacccaatcattttatactttcactttccaattaaaacccgccacgtcacacaaaag

SEQ ID NO: 49 - protein, 101 aa, Torque teno midi virus 1
MWMSGIADSHDSWCDCDTPFAHLLASIFPPGHTDRTRTIQEILTRDFRKTCLSGGADATNSGMAETIEEKREDFQKEEKEDFTEEQNIEDLLAAVADAEGR

SEQ ID NO: 50 - protein, 237 aa, Torque teno midi virus 1
MWMSGIADSHDSWCDCDTPFAHLLASIFPPGHTDRTRTIQEILTRDFRKTCLSGGADATNSGMAETIEEKREDFQKEEKEDFTEEQNIEDLLAAVADAEGRYQTNQLKTQETKTNMMCPIQSKKHYKLLTQQKTLLPRCSMTGTTDGVALHQQLLKECNKTSQLIHLSNLIQTQNQHPRKKDYYQSSTTHKRKRKRSTNVSSLSAKKVHARSRKRRKTSSSSSSSSSSSSRNSSTTS

SEQ ID NO: 51 - protein, 239 aa, Torque teno midi virus 1
MWMSGIADSHDSWCDCDTPFAHLLASIFPPGHTDRTRTIQEILTRDFRKTCLSGGADATNSGMAETIEEKREDFQKEEKEDFTEEQNIEDLLAAVADAEGRTSTQEKKTTTSPPRPTKENGKDQPMSPLSLRRKYMPGAGNGGKHPQAHPAAAAAAAETQAQPLSTNQGLKSETKIITTTNGGTRITLTRFKPGFEQETEKELAQAFNRPPRLFKEDKPFYPWLPRFTPLVNFHLNFKG

SEQ ID NO: 52 - protein, 673 aa, Torque teno midi virus 1
MPFWWGRRNKFWYGRNYRRKKRRFPKRRKRRFYRRTKYRRPARRRRRRRRKVRRKKKTLIVRQWQPDSIVLCKIKGYDSIIWGAEGTQFQCSTHEMYEYTRQKYPGGGGFGVQLYSLEYLYDQWKLRNNIWTKTNQLKDLCRYLKCVMTFYRHQHIDFVIVYERQPPFEIDKLTYMKYHPYMLLQRKHKIILPSQTTNPRGKLKKKKTIKPPKQMLSKWFFQQQFAKYDLLLIAAAACSLRYPRIGCCNENRMITLYCLNTKFYQDTEWGTTKQAPHYFKPYATINKSMIFVSNYGGKKTEYNIGQWIETDIPGEGNLARYYRSISKEGGYFSPKILQAYQTKVKSVDYKPLPIVLGRYNPAIDDGKGNKIYLQTIMNGHWGLPQKTPDYIIEEVPLWLGFWGYYNYLKQTRTEAIFPLHMFVVQSKYIQTQQTETPNNFWAFIDNSFIQGKNPWDSVITYSEQKLWFPTVAWQLKTINAICESGPYVPKLDNQTYSTWELATHYSFHFKWGGPQISDQPVEDPGNKNKYDVPDTIKEALQIVNPAKNIAATMFHDWDYRRGCITSTAIKRMQQNLPTDSSLESDSDSEPAPKKKRLLPVLHDPQKKTEKINQCLLSLCEESTCQEQETEENILKLIQQQQQQQQKLKHNLLVLIKDLKVKQRLLQLQTGVLE

SEQ ID NO: 53 - protein, 209 aa, Torque teno midi virus 1
MPFWWGRRNKFWYGRNYRRKKRRFPKRRKRRFYRRTKYRRPARRRRRRRRKISDQPVEDPGNKNKYDVPDTIKEALQIVNPAKNIAATMFHDWDYRRGCITSTAIKRMQQNLPTDSSLESDSDSEPAPKKKRLLPVLHDPQKKTEKINQCLLSLCEESTCQEQETEENILKLIQQQQQQQQKLKHNLLVLIKDLKVKQRLLQLQTGVLE

SEQ ID NO: 54 - protein, 209 aa, Torque teno midi virus 1; identical to SEQ ID NO: 53

SEQ ID NO: 55 - protein, 25 aa, synthetic construct
  VARIANT 3: note = /replace="Ile"
  MOD_RES 9..10: note = Any amino acid
  MOD_RES 15: note = Any amino acid
  MOD_RES 17: note = Any amino acid
  MOD_RES 20: note = Any amino acid
  MOD_RES 24: note = Any amino acid
  REGION 1..25: note = MISC_FEATURE - /note="Variant residues given in the sequence have nopreference with respect to those in the annotationsfor variant positions"
  REGION 1..25: note = source = /note="Description of Artificial Sequence: Syntheticpeptide"
LILRQWQPXXIRRCXIXGYXPLIXC

SEQ ID NO: 56 - protein, 7 aa, synthetic construct
  MOD_RES 3..4: note = Any amino acid
  MOD_RES 6: note = Any amino acid
  REGION 1..7: note = source = /note="Description of Artificial Sequence: Syntheticpeptide"
NYXXHXD

SEQ ID NO: 57 - protein, 9 aa, synthetic construct
  MOD_RES 4..5: note = Any amino acid
  REGION 1..9: note = source = /note="Description of Artificial Sequence: Syntheticpeptide"
FSLXXLYDZ

SEQ ID NO: 58 - protein, 18 aa, synthetic construct
  MOD_RES 2: note = Any amino acid
  MOD_RES 5: note = Any amino acid
  MOD_RES 8: note = Any amino acid
  MOD_RES 16: note = Any amino acid
  REGION 1..18: note = source = /note="Description of Artificial Sequence: Syntheticpeptide"
NXWTXSNXDLDLCRYXGC

SEQ ID NO: 59 - protein, 16 aa, synthetic construct
  MOD_RES 2: note = Any amino acid
  MOD_RES 5: note = Any amino acid
  MOD_RES 9: note = Any amino acid
  MOD_RES 11: note = Any amino acid
  MOD_RES 13: note = Any amino acid
  REGION 1..16: note = source = /note="Description of Artificial Sequence: Syntheticpeptide"
TXPSXHPGXMXLXKHK

SEQ ID NO: 60 - protein, 10 aa, synthetic construct
  MOD_RES 5: note = Any amino acid
  MOD_RES 9: note = Any amino acid
  REGION 1..10: note = source = /note="Description of Artificial Sequence: Syntheticpeptide"
IPSLXTRPXG

SEQ ID NO: 61 - protein, 18 aa, synthetic construct
  MOD_RES 3: note = Any amino acid
  MOD_RES 6: note = Any amino acid
  MOD_RES 9: note = Any amino acid
  MOD_RES 16: note = Any amino acid
  REGION 1..18: note = source = /note="Description of Artificial Sequence: Syntheticpeptide"
RIXPPXLFXDKWYFQXDL

SEQ ID NO: 62 - protein, 8 aa, synthetic construct
  MOD_RES 3: note = Any amino acid
  MOD_RES 5: note = Any amino acid
  REGION 1..8: note = source = /note="Description of Artificial Sequence: Syntheticpeptide"
LLXIXATA

SEQ ID NO: 63 - protein, 11 aa, synthetic construct
  MOD_RES 2..3: note = Any amino acid
  MOD_RES 6: note = Any amino acid
  MOD_RES 9: note = Any amino acid
  REGION 1..11: note = source = /note="Description of Artificial Sequence: Syntheticpeptide"
LXXPFXSPXTD

SEQ ID NO: 64 - protein, 14 aa, synthetic construct
  MOD_RES 4..5: note = Any amino acid
  MOD_RES 9: note = Any amino acid
  MOD_RES 12: note = Any amino acid
  REGION 1..14: note = source = /note="Description of Artificial Sequence: Syntheticpeptide"
YNPXXDKGXGNXIW

SEQ ID NO: 65 - protein, 8 aa, synthetic construct
  MOD_RES 7: note = Any amino acid
  REGION 1..8: note = source = /note="Description of Artificial Sequence: Syntheticpeptide"
CPYTZPXL

SEQ ID NO: 66 - protein, 8 aa, synthetic construct
  MOD_RES 1: note = Any amino acid
  MOD_RES 4: note = Any amino acid
  MOD_RES 6: note = Any amino acid
  REGION 1..8: note = source = /note="Description of Artificial Sequence: Syntheticpeptide"
XFGXGXMP

SEQ ID NO: 67 - protein, 8 aa, synthetic construct
  MOD_RES 3: note = Any amino acid
  MOD_RES 6: note = Any amino acid
  MOD_RES 8: note = Any amino acid
  REGION 1..8: note = source = /note="Description of Artificial Sequence: Syntheticpeptide"
HQXEVXEX

SEQ ID NO: 68 - protein, 12 aa, synthetic construct
  MOD_RES 3: note = Any amino acid
  MOD_RES 5: note = Any amino acid
  MOD_RES 7: note = Any amino acid
  REGION 1..12: note = source = /note="Description of Artificial Sequence: Syntheticpeptide"
KYXFXFXWGGNP

SEQ ID NO: 69 - protein, 8 aa, synthetic construct
  MOD_RES 5: note = Any amino acid
  REGION 1..8: note = source = /note="Description of Artificial Sequence: Syntheticpeptide"
HSWDXRRG

SEQ ID NO: 70 - protein, 7 aa, synthetic construct
  MOD_RES 5: note = Any amino acid
  REGION 1..7: note = source = /note="Description of Artificial Sequence: Syntheticpeptide"
AIKRXQQ

SEQ ID NO: 71 - protein, 8 aa, synthetic construct
  MOD_RES 1: note = Any amino acid
  MOD_RES 5..6: note = Any amino acid
  REGION 1..8: note = source = /note="Description of Artificial Sequence: Syntheticpeptide"
XQZQXXLR

SEQ ID NO: 72 - protein, 9 aa, synthetic construct
  MOD_RES 3: note = Any amino acid
  VARIANT 4: note = /replace="Ile"
  MOD_RES 6..7: note = Any amino acid
  REGION 1..9: note = MISC_FEATURE - /note="Variant residues given in the sequence have nopreference with respect to those in the annotationsfor variant positions"
  REGION 1..9: note = source = /note="Description of Artificial Sequence: Syntheticpeptide"
PRXLQXXDP

SEQ ID NO: 73 - protein, 8 aa, synthetic construct
  MOD_RES 5: note = Any amino acid
  REGION 1..8: note = source = /note="Description of Artificial Sequence: Syntheticpeptide"
HSWDXRRG

SEQ ID NO: 74 - protein, 7 aa, synthetic construct
  MOD_RES 5: note = Any amino acid
  REGION 1..7: note = source = /note="Description of Artificial Sequence: Syntheticpeptide"
AIKRXQQ

SEQ ID NO: 75 - protein, 7 aa, synthetic construct
  MOD_RES 4..5: note = Any amino acid
  REGION 1..7: note = source = /note="Description of Artificial Sequence: Syntheticpeptide"
QZQXXLR

SEQ ID NO: 76 - protein, 7 aa, synthetic construct
  MOD_RES 2: note = Any amino acid
  REGION 1..7: note = source = /note="Description of Artificial Sequence: Syntheticpeptide"
KXKRRRR

SEQ ID NO: 77 - protein, 13 aa, synthetic construct
  MOD_RES 3: note = Any amino acid
  MOD_RES 6..7: note = Any amino acid
  MOD_RES 10..11: note = Any amino acid
  REGION 1..13: note = source = /note="Description of Artificial Sequence: Syntheticpeptide"
PIXSLXXYKXXTR

SEQ ID NO: 78 - protein, 12 aa, synthetic construct
  MOD_RES 3: note = Any amino acid
  MOD_RES 10: note = Any amino acid
  REGION 1..12: note = source = /note="Description of Artificial Sequence: Syntheticpeptide"
LAXQLLKECXKN

SEQ ID NO: 79 - protein, 6 aa, synthetic construct
  MOD_RES 4: note = Any amino acid
  REGION 1..6: note = source = /note="Description of Artificial Sequence: Syntheticpeptide"
HLNXLA

SEQ ID NO: 80 - protein, 5 aa, synthetic construct
  REGION 1..5: note = source = /note="Description of Artificial Sequence: Syntheticpeptide"
DRPPR

SEQ ID NO: 81 - protein, 9 aa, synthetic construct
  MOD_RES 2: note = Any amino acid
  MOD_RES 8: note = Any amino acid
  REGION 1..9: note = source = /note="Description of Artificial Sequence: Syntheticpeptide"
DXPFYPWXP

SEQ ID NO: 82 - protein, 7 aa, synthetic construct
  MOD_RES 2: note = Any amino acid
  MOD_RES 6: note = Any amino acid
  REGION 1..7: note = source = /note="Description of Artificial Sequence: Syntheticpeptide"
VXFKLXF

SEQ ID NO: 83 - protein, 15 aa, synthetic construct
  MOD_RES 2: note = Any amino acid
  MOD_RES 9: note = Any amino acid
  MOD_RES 14: note = Any amino acid
  REGION 1..15: note = source = /note="Description of Artificial Sequence: Syntheticpeptide"
WXPPVHBVXGIERXW

SEQ ID NO: 84 - protein, 6 aa, synthetic construct
  MOD_RES 6: note = Any amino acid
  REGION 1..6: note = source = /note="Description of Artificial Sequence: Syntheticpeptide"
AKRKLX

SEQ ID NO: 85 - protein, 10 aa, synthetic construct
  MOD_RES 4: note = Any amino acid
  MOD_RES 7..8: note = Any amino acid
  REGION 1..10: note = source = /note="Description of Artificial Sequence: Syntheticpeptide"
PSSXDWXXEY

SEQ ID NO: 86 - protein, 5 aa, synthetic construct
  REGION 1..5: note = source = /note="Description of Artificial Sequence: Syntheticpeptide"
DRPPR

SEQ ID NO: 87 - protein, 5 aa, synthetic construct
  REGION 1..5: note = source = /note="Description of Artificial Sequence: Syntheticpeptide"
PFYPW

SEQ ID NO: 88 - protein, 8 aa, synthetic construct
  MOD_RES 3: note = Any amino acid
  MOD_RES 7: note = Any amino acid
  REGION 1..8: note = source = /note="Description of Artificial Sequence: Syntheticpeptide"
NVXFKLXF

SEQ ID NO: 89 - protein, 25 aa, synthetic construct
  VARIANT 1: note = /replace="Ile"
  MOD_RES 2..5: note = Any amino acid
  MOD_RES 9..13: note = Any amino acid
  MOD_RES 15: note = Any amino acid
  MOD_RES 17: note = Any amino acid
  MOD_RES 19..21: note = Any amino acid
  VARIANT 22: note = /replace="Ile"
  REGION 1..25: note = MISC_FEATURE - /note="Variant residues given in the sequence have nopreference with respect to those in the annotationsfor variant positions"
  REGION 1..25: note = source = /note="Description of Artificial Sequence: Syntheticpeptide"
LXXXXWQPXXXXXCXIXGXXXLWQP

SEQ ID NO: 90 - protein, 15 aa, synthetic construct
  MOD_RES 2: note = Any amino acid
  MOD_RES 4..6: note = Any amino acid
  MOD_RES 8..11: note = Any amino acid
  MOD_RES 13: note = Any amino acid
  REGION 1..15: note = source = /note="Description of Artificial Sequence: Syntheticpeptide"
NXWXXXNXXXXLXRY

SEQ ID NO: 91 - protein, 8 aa, synthetic construct
  MOD_RES 4..5: note = Any amino acid
  MOD_RES 7: note = Any amino acid
  REGION 1..8: note = source = /note="Description of Artificial Sequence: Syntheticpeptide"
YNPXXDXG

SEQ ID NO: 92 - DNA, 456 bp, Torque teno virus
  source 1..456: mol_type = other DNA
atgcacttttctaggatatccaggaagaaaaggctactgctactgcacacagtgccaactccacagaaaactctcaaacttttaagaggtatgtggagtcctcccactgacgatgaacgtgtccgcgagcgaaaatggtttctcgcaactgtctattctcactctgctttctgtggctgcaatgatcctgtcggtcacctctgtcgcctggctactctctctaaccgtccggagaacccgggaccctccgggggacgtcgtgctccttcgatcggggtcctacccgctctcccggctgctaccgagcagccaggtgatcgagcaccatggcctatgggtggtggaggagacgccgcagaaggtggaagagatggaggagaaggcccaggtggagacgcccatggaggacccgcagacgcagacctgctagacgccgtggacgccgcggaacagtaa

SEQ ID NO: 93 - DNA, 2298 bp, Torque teno virus
  source 1..2298: mol_type = other DNA
atggcctatgggtggtggaggagacgccgcagaaggtggaagagatggaggagaaggcccaggtggagacgcccatggaggacccgcagacgcagacctgctagacgccgtggacgccgcggaacagtaaggagacggaggcgcgggaggtggaggaggcgctataggaggtggaggagaaagggcagacgcaggagaaaaaagaaacttataataagacaatggcagccaaactataccagaaagtgcaacatagtaggctacatgccagtaatcatgtgtggagaaaacactctaataagaaactatgccacacacgcagacgactgctactggccgggaccctttgggggcggcatggccacccagaaattcacacccagaatcctgtacgatgactacaagaggtttatgaactactggacctcctcaaacgaggacctagacctctgtagatacaggggagtcaccctgtactttttcagacacccagatgtagactttatcatcttaataaacaccacacctccattcgtagatacagagatcacaggacccagcatacatccgggcatgatggccctgaacaagagagccaggttcatccccagcctaaagactagacctggcagaagacacatagtaaagattagagtgggggcccccaaactgtacgaggacaagtggtacccccagtcagaactctgtgacgtgcccctgctaaccgtctacgcgaccgcagcggatatgcaatatccgttcggctcaccactaactgacactcctgttgtaaccttccaagtgttgcgcagcatgtacaacgacgccctcagcacacttccctctaactttgaaaacgcaagcagtccaggccaaaaactttacaaagaaatatctacatatttaccatactacaacaccacagaaacaatagcacaactaaagagatatgtagaaaatacagaaaaaaatggcacaacgccaaacccgtggcaatcaaaatatgtaaacactactgccttcaccactgcactaaatgttacaactgaaaaaccatacaccaccttctcagacagctggtacaggggcacagtatacaaagaaacaatcactgaagtgccacttgccgcagcaaaactctatcaaaaccaaacaaaaaagctgctgtctacaacatttacaggagggtccgagtacctagaataccatggaggcctgtacagctccatatggctatcagcaggccgatcctactttgaaacaaagggagcatacacagacatctgctacaacccctacacagacagaggagagggcaacatggtgtggatagactggctatcaaaaacagactccagatatgacaaaacccgcagcaaatgccttatagaaaagctacccctatgggcagcagtatacgggtacccagaatactgtgccaagagcaccggagactcaaacatagacatgaacgccagagtagtaataaggtgcccctacaccgtcccccagatgatagacaccagcgacgaactaaggggcttcatagtatacagctttaactttggcaggggcaaaatgcccggaggcagcagcgaggtacccataagaatgagagccaagtggtacccctgcctgtttcaccaaaaagaagttctagaagccttgggacagtcgggccccttcgcctaccactgcgaccaaaaaaaagcagtgctaggtctaaaatacagatttcactggatatggggcggaagccccgtgtttccacaggttgttagaaacccctgcaaagacacacacggttcctcgggccctagaaagcctcgctcaatacaaatcattgacccgaagtacaacacaccagagctcacaatccacgcgtgggatttcagacgtggcttctttggctcaaaagctattaaaagaatgcaacaacaaccaacagatgctgaacttcttccaccaggccgcaagaggagcaggcgagacacagaagccctccaaagcagccaagaaaagcaaaaagaaagcttacttttcaaacacctccagctccagcgacgaatacccccatgggaaagctcgcaggcctcgcagacagaggcagagagcgaaaaagagcaagagggcagtctctcccagcagctccgagagcagctttaccagcaaaagctcctcggcaagcagctcagggaaatgttcctacaactccacaaaatccaacaaaatcaacacgtcaaccctaccttattgccaagggatcaggctttaatctgctggtctcagattcagtaa

SEQ ID NO: 94 - DNA, 174 bp, Torque teno virus
  source 1..174: mol_type = other DNA
atgtttggagaccctaaaccatacaaaccctccagcaacgactggaaagaggagtacgaggccgctaagtattgggacaggccccccagatctaaccttagagataaccccttctatccctgggcccccccaagcaatccctacaaagtaaactttaaactaggcttccaataa

SEQ ID NO: 95 - DNA, 456 bp, Torque teno virus
  source 1..456: mol_type = other DNA
atgcacttttctaggatatccagaaagaaaaggctactgctactgcaaacagagccagctccacagaagactctcaaacttttaaaaggtatgtggagtcctcccactgacgatgaacgtgtccgcgagcgaaaatggttcctcgccactgtttattctcactctgctttctgtggctgcaatgatcctgtcggccacctctgtcgcttggctactctatctaaccgtccggagaacccgggaccctccgggggacgtcgtgctccttcgatcgggatcctacccgctctcccggctgctaccgagcagcccggtgatcgagcaccatggcctatgggtggtggaggagacgccgcagaaggtggaagagatggaggagaaggcccaggtggagacgcccatggaggacccgcagacgcagacctgctagacgccgtggacgccgcagaacagtaa

SEQ ID NO: 96 - DNA, 2298 bp, Torque teno virus
  source 1..2298: mol_type = other DNA
atggcctatgggtggtggaggagacgccgcagaaggtggaagagatggaggagaaggcccaggtggagacgcccatggaggacccgcagacgcagacctgctagacgccgtggacgccgcagaacagtaaggagacggaggcgcgggaggtggaggaggcgctataggaggtggaggagaaagggcagacgcgggagaaaaaagaaacttataataaaacaatggcagccaaactataccagagagtgcaacatagtaggctacatgccagtaatcatgtgtggagagaacactctaataagaaactatgccacacacgcagacgactgctactggccgggaccctttgggggcggcatggccacccagaaattcacactcagaatcctgtacgatgactacaagaggtttatgaactactggacctcctcaaacgaggacctagacctctgtagatacaggggagtcaccctgtactttttcagaaacccagatgtagactttatcatcctcataaacaccacacctccgttcgtagatacagagatcacaggacccagcatacatccgggcatgatggccctcaacaaaagagccaggttcatccccagcctaaaaactagacctggcagaagacacatagtaaagattaaagtgggggcccccaaactgtacgaggacaagtggtacccccagtcagaactctgtgacatgcccctactaaccgtctacgccaccgcagcggatatgcaatatccgttcggctcaccactaactgacactcctgttgtaaccttccaagtgttgcgcagcatgtacaacgacgcccttagcatacttccctctaactttcaaagcccagacagtccaggccaaaaactttacgaacaaatatctaagtatttaccatactacaacaccacagaaacaatggcacaactaaagagatatatagaaaatacagaaaaaaataccacatcgccaaacccatggcaaacaaaatatgtaaacactactgccttcaccactccacaaactgttacaactcaacagccatacaccagcttctcagacagctggtacaggggcacagtatacacaaacgaaatcactaaggtgccacttgccgcagcaaaagtgtatgaaactcaaacaaaaaacctgctgtctacaacatttacaggagggtcagagtacctagaataccatggaggcctgtacagctccatatggctatcagcaggccgatcctactttgaaacaaagggagcatacacagacatctgctacaacccctacacagacagaggagagggcaacatggtgtggatagactggctatcaaaaacagactccagatatgacaaaacccgcagcaaatgccttatagaaaagctacccctatgggcagcagtatacgggtacgcagaatactgtgccaagagcaccggagactcaaacatagacatgaacgccagagtagtaattaggtgcccctacaccaccccccagatgatagacaccagcgacgaactaaggggcttcatagtatacagctttaactttggcaggggcaaaatgcccggaggcagcagcgaggtacccattagaatgagagccaagtggtacccctgcctacttcaccaaaaaggagttctagaagccttaggacagtcaggccccttcgcctaccaccgcgaccaaaaaaaagcagtgctaggtctaaaatacagatttcactggatatggggcggaaaccccgtgtttccacaggttgttagaaacccctgcaaagacacacacggttcctcgggccctagaaagcctcgctcaatacaaatcattgacccgaagtacaacacaccagagctcacaatccacgcgtgggatttcagacgtggcttctttggcccaaaagctattaagagaatgcaacaacaaccaacagatgctgaacttcttccaccaggccgcaagaggagcaggcgagacaccgaagccctccaaagcagccaagaaaagcagaaagaaagcttacttttcaaacagctccagctccggcgacgagtacccccgtgggaaagctcgcaggcctcgcagacagaggcagagagcgaaaaagagcaagaggacagtctctcccagcagctccgagagcagcttcaccagcaaaagctcctcggcaagcagctcagggaaatgttcctacaactccacaaaatccaacaaaatcaacacgtcaaccctaccctattgccaaaagatcaggctttaatatgctggtctcagattcagtaa

SEQ ID NO: 97 - DNA, 174 bp, Torque teno virus
  source 1..174: mol_type = other DNA
atgttcggagaccctaaaccatacaaaccctccagcaacgactggaaagaggagtacgaggccgctaaatattgggacaggccccccagatttgaccttagagataagcccttctatccctgggcccccccaagcaatccctacaaagtaaactttaaactaggctttcaataa

SEQ ID NO: 98 - DNA, 150 bp, Torque teno virus
  source 1..150: mol_type = other DNA
atggctgagttttccacgcccgtccgcagcggtgaagccacggagggacctcagcgcgtcccgagggcgggtgccgaaggtgagtttacacaccgcagtcaaggggcaattcgggctcgggactggccgggctatgggcaaggctcttaa

SEQ ID NO: 99 - DNA, 450 bp, Torque teno virus
  source 1..450: mol_type = other DNA
atgtttctcggtaaactttacagaaagaaaaggaaagtgcttctgcagactgtgccagacccacagaaggctaggcggcttctgattatgtggcagccccccgtgcacaaagtacccgggatcgagagaaactggtacgagagttgctttcgatcccatgctgctgtgtgtggctgtggcgactttgttggccatcttaatcatctggcagctactctgggtcgccctccgcgttctcggcaccccgggggccccggcactccgcagataagaaacctgccagcgctcccggcaccccagggtgagcccggtgacagagcgccatggcctacggatggtggggccgccggcgccgctggagaagatggaggacgcggcgcagaccgtggagaaccaggagacgtagaagacgacgcgctcctcgccgctttcgacctcgtcgaagagtaa

SEQ ID NO: 100 - DNA, 2202 bp, Torque teno virus
  source 1..2202: mol_type = other DNA
atggcctacggatggtggggccgccggcgccgctggagaagatggaggacgcggcgcagaccgtggagaaccaggagacgtagaagacgacgcgctcctcgccgctttcgacctcgtcgaagagtaaggaggcgcagggggcggtggcgcagacggtatagaaaatggaggagacgcaggggcagacggacgcacagaaaaaagataatcataaaacagtggcagccgaactttataagacgctgctacataataggctacctgcctctcatattctgtggcgagaacaccaccgccaataactttgccacccactcggacgacatgatagccaaaggaccgtggggggggggcatgactaccactaagttcactttgagaatcctgtacgacgagtttaccaggtttatgaacttctggactgtcagtaacgaagacctagacctgtgtagatacgtgagctgcaaactgatattctttaagcaccccacggtagactttatagtcaggataaacacagagcctccgttcctagacactaacctgaccgcggcacagattcacccgggcatcatgatgctaagcaaaaaacacatactcataccctctctaaagaccaggcctagcagaaaacacagggtggtcgtcagggtgggcccacctagactgtttcaagacaagtggtacccccagtcagacctgtgtgacacagttctgctttccgtgtttgcaacggcctgtgacttgcaatatccgttcggctcaccactaactgacaacccttgcgtcaacttccagattctggggcaccagtacaaaaaccaccttagtattagctccacaaacgataccactaacaaacaacactatgacaacactttatttaacaaaatagtattatataacacttttcaaacaatagctcagctcaaagaaacaggacaactcacaaacttatggaacgaagtacaaaacacaacagcactgtcaccaaaaggcacaaatgcaactataagcaaagacacctggtacaaaggaaacacatacaaagacaagattaaagagttagcagaaaaaactcgaagtagatttgcagctgcaacaaaagcagccctgccaaactaccctacaatcatgtccacagacctgtatgagtaccactcaggcatatactccagcatattcctagcagcaggcaggagctactttgagaccccgggggcctacacagacgtcatatacaacccttttacagacaaaggcacaggaaacatggtctggatagactacctcacaaaaccagactccatatacacaaagaacaaaagcaaatgcgagatatttgacgtacccctgtgggccaccttcacaggatactcagaattctgttcaaaagttacaggagacaccgccattcacctaactgccagagtagtagtcagatgcccctacaccgagcccatgctaatagaccactcagaccccaacaggggctttgtaccatactcctttaactttggagagggcaagatgcccggaggctcctcaaaagtacccataagaatgagagccaagtggtacgtgaacatgtttcaccagcaagaattcatggaggccatagttgagagcggaccgcttgcttacaagggcgacataaaatcagcggtactcaccatgaaatacagattccactggaaatggggcggaaaccctatatccaaacaggtcgtccggaatccctgctccacctccagcacctccgcgggccatcgaggacctcgcagcatacaagtcgttgacccgaagcacgttaccccggaagtcacctggcactcgtgggacatcaagcgaggtctctttggcaaagcaggtattaagagaatgcaacaagaatcagatgctctttacattcctacaggaccactcaagaggccacggagggacaccaacgcccaagacccagaagagcaaaacgaaagctcaggtttcagagtccagcagcgactcccctgggtccactccagccaagaaacgcaaagctcccaagaggagatgcaagcggaggggacggtacaagaacaactcctcctccagctccgagagcagcgagtactccggttccagctccaacagctcgccagccaagtcctcaaagtgcaagcagggcaaggcctacaccccctattatcttcccaagcgtaa

SEQ ID NO: 101 - DNA, 180 bp, Torque teno virus
  source 1..180: mol_type = other DNA
atgtttgagccccagggtcccaaacccatacagggctacaacgattggttagaagagtacacctgctgtaaattctgggacaggcctcccagaaagctacacacagatacacccttttacccctgggcaccaaaacccccagaccaagtgagagtctcctttaaacttaacttccaataa

SEQ ID NO: 102 - DNA, 444 bp, TTV-like virus DXL1
  source 1..444: mol_type = other DNA
atgtttcttggcagggcctggagaaagaaaaggcaagtgccactgccgacactgccagtggtgccgcttccacaaccttcacctatgagcagccagtggagacccccggttcacaatgtccaggggctggagcgcaattggtgggagtgcttcttccgttctcatgcttgtttttgtggctgtggtgatgctattactcatattaatcatctggcgactcgttttggacgtcctcctactacctcaactccccgaggaccgcaggcacctccagtgactccgtacccggccctgccggccccagagcctagccctgagccatggcgtggcgccggtggcgatggcggccgtggtggagacgccggaggcgccgccggtggagaaggagacggaggagacccagacgacgccgcccttatcgacgccgtcgacctcgcagagtaa

SEQ ID NO: 103 - DNA, 2319 bp, TTV-like virus DXL1
  source 1..2319: mol_type = other DNA
atggcgtggcgccggtggcgatggcggccgtggtggagacgccggaggcgccgccggtggagaaggagacggaggagacccagacgacgccgcccttatcgacgccgtcgacctcgcagagtaaggaggcgcagggggcggtggaggcgcgcgtacagacgttgggggcgacgcagacgcagacgcaggcacaaaaagaaacttgtactgactcagtggcaaccagcagtagttaagaggtgcctaatagtgggctttgacccccttataatatgtggcattaacagaacaatatttaactacactacacactctgaagactttacttttaacaacgacagctttggaggggggctctgtaccgctcagtacacactaagaatccttttccaagaaaagctggcccagcacaacttctggtcagctagcaacgaagacctagaccttgccaggtacctaggagccacaatagtactttacagacaccctacagtagacttcttagttagaattcgcaccagtcctccctttgaggacacagacatgacagccatgacactacatccaggcatgatgatgctagctaaaaagacaattaaaattcccagtcttaaaacaagaccgtccagaaaacacgtagtaaggattagagtaggggcccctaaactatttgaagacaagtggtacccccagaacgagctatgtgatgtaactctgctaaccatacaggcaaccacagctgatttccaatatccgttcggctcaccactaacgaactccccctgttgcaacttccaggttcttaacagtaactatgacaatgcacattccatacttaacttgtcaaacgaaccaacaaacaaatggcacacctatagaaataactgctataaatttctactagaacagtacagctactacaacactaaacaagtagtagcacaacttaaatataaatggaaccctaatcaaaaccctactatgccaaatacaagcaatgcatcactttctaaaaaacctgatgaccttactaaaaccaaaacaacaaacgagtatccacattgggacaccctatatggtggtttagcatatggacacagcactgtaacacctggcactacctcatcaccaacagacctaaaaacacaaatgcttacaggcaacgaattttatacaacagcaggcaaaaagttaatagatacatttcacccaattccttactatgaaaacggatcttctaaagccaacaccaacatatttgactactacacaggcatgtacagtagtattttcctgtcttcaggcagatcaaacccagaagtaaagggcagctacacagacatctcttacaaccctctgacagacaagggagtaggtaacatgatttggatagactggctcactaaaggagacacagtatacgaccccaaaaaaagcaagtgcctactctcagactttccattgtggtcactttgttatggatacccagactactgcagaaaacaaaccggagactcaggtatttactatgactacagagtacttataagatgtccatacacataccctcaattaataaaacacaacgacaaatactttggcttcgtagtgtacagcgaaaactttggactggggcgactaccaggaggcaaccctaaccccccaactagaatgagactgcactggtaccctaatatgttccaccaaacagaagtactagagtgcatagctcaaagcggaccgtttgcttatcatggagacgagagaaaagctgttctgactgccaaatacaagttcagatggaagtggggaggcaatcctgtgtttcaacaggttctccgagacccctgcaccggaggtgccgtggcgccccacaccagtcgacaccctcgtgcaatacaagtccatgacccgaagtatcaggccccggagtacctcttccacaaatgggacttcagaaggggactgtttagcactaaaggtattaagagagtgtcagaacaaccagtacatgatgagtattttacagggagcagcaagagacccaagaaagacaccaacccaagcccccaaggagaagagcaaaaagaaggctcgcgtttcagagtcccagagctcagaccctggctcccctccagccaggaaacgcagagccaaagcgagcaagaagaaacagccccgaaaacggtccaagagcagctacaagaacaactccagcagcagcagctcatgggaatccagctcagaaacgtctgtctccagctcgcaagagtccaagcggggcacagtctccaccccgttttccaatgccatgcataa

SEQ ID NO: 104 - DNA, 435 bp, TTV-like virus DXL1
  source 1..435: mol_type = other DNA
atgacccgaagtatcaggccccggagtacctcttccacaaatgggacttcagaaggggactgtttagcactaaaggtattaagagagtgtcagaacaaccagtacatgatgagtattttacagggagcagcaagagacccaagaaagacaccaacccaagcccccaaggagaagagcaaaaagaaggctcgcgtttcagagtcccagagctcagaccctggctcccctccagccaggaaacgcagagccaaagcgagcaagaagaaacagccccgaaaacggtccaagagcagctacaagaacaactccagcagcagcagctcatgggaatccagctcagaaacgtctgtctccagctcgcaagagtccaagcggggcacagtctccaccccgttttccaatgccatgcataaacaaagtttttattttccctga

SEQ ID NO: 105 - DNA, 465 bp, TTV-like virus DXL2
  source 1..465: mol_type = other DNA
atgtttctcggtaaactttacagaaagaaaaggaaactgctactgcaagctgtgcgagctccacaggcgccatcttccatgagctcctcctggcgagtgccccgcggcgatgtctccgcccgcgagctatgttggtaccgctcagttcgagagagccacgatgctttttgtggctgtcgtgatcctgtttttcatctttctcgtctggctgcacgttctaaccatcagggacctccgacgccccccacggacgagcgcccgtcggcgtctaccccagtgaggcgcctgctgccgctgccctcctaccccggcgagggtccccaggctagatggcctggtggagatggagaaggcgctggtgacgcccgcggaggcgctggagatggcggcgcccgcgcaggcgaagaagagtaccggcccgaagacctcgacgagctgttcggcgctaccgaacaagaacagtaa

SEQ ID NO: 106 - DNA, 2070 bp, TTV-like virus DXL2
  source 1..2070: mol_type = other DNA
atgccagttatctgggcgggcatgggcacggggggccaaaactacgccgtccgctcagatgactttgtagtagacaagggcttcgggggctccttcgctacagagactttctccttgagagtactgtatgaccagcaccagaggggctttaaccggtggtcccacaccaacgaggacctagaccttgcccgttacaggggatgcaaatggaccttttacagacacccagacactgactttatagtgtacttcactaacaatccccccatgaaaactaaccagtacactgcccctctcaccactcctggaatgctcatgagaagcaaatataagatactaatacctagttttaaaacaaaacccaagggaaaaaagacaataagcttcagagccagacccccaaaactattccaagacaagtggtacactcaacaagacctctgccctgtgcccctcatccaactgaacttaaccgcagctgatttcacacatccgttcggcttaccactaactgactctccttgcgtaaggttccaagtcctcggagacttgtacaataactgtctcaatatagaccttccgcaatttgatgacaagggtacaatttcagacgcatcctcttacagtagagataataagcagcagttagaagaattatataaaactctatttgttaaaaagggctgcggacactactggcaaacattcatgaccaatagcatggtaaaagcacacatagatgctgcacaggcacaaaaccatcaacaagacacctcaggccctcaaagtgcaaaagatccatttccaacaaaacctgacagaaaccaatttgaacaatggaaaaacaaattcacagaccccagagacagcaactttctctttgccacttatcacccagaaaacattacacagactatcaaaacaatgagagacaataactttgctctagaaactggaaagaatgacctttatggtgattatcaggcccagtatactagaaacactcaccttctagactactacctgggcttctacagccccatattcttgtccagtggcagatccaatactgaattctttactgcctacagagacataatatacaatccactactagacaaaggcacaggtaatatgatttggttccaataccacacaaagactgacaacatatttaaaaaaccagagtgccactgggaaatactagacatgcccctgtgggccctctgcaacggctacaaagagtacctagagagccaaataaaatatggtgatatcttagtagaaggcaaagtcctcataagatgcccatacaccaaacctcccctagcagaccccaacaacagtctagcaggatatgtagtctacaacacaaactttggacaaggcaagtggatcgacggcaagggctacatacccctaagacacaggagcaagtggtatgtcatgctcatgtaccagacggacgtactccatgacctagtgacttgtggaccctggcaatacagagacgataataagaactctcaactgatagccaagtatagatttactttctactggggaggtaacatggtacattctcaggtcatcaggaacccgtgcaaagacacccaagtatccggcccccgtcgacagcctagagagatacaagtcgttgacccgcaactcatcaccccgccgtgggtcctccactcgttcgaccagagacgaggaatgtttactgagacagctatcagacgtctgctcagacaaccactacctggcgagtatgctcctccagcactcagggtcccgctcctctttccctcctcagagttccaacgagagggagaaggtgcagaaagcgacttatcttccccggccaaaagaccacgactctggcaagaagaggacagcgagacgcagacgcagtcctcggaggggccggcggagacgacgagggagctcctcgagcgaaagctcagagagcagcgagtcctcaacctccaactccagcaattcgccgtacaactcgccaagacccaagcgaacctccacataaaccccttattatactcccagcagtaa

SEQ ID NO: 107 - DNA, 273 bp, TTV-like virus DXL2
  source 1..273: mol_type = other DNA
atgctcctccagcactcagggtcccgctcctctttccctcctcagagttccaacgagagggagaaggtgcagaaagcgacttatcttccccggccaaaagaccacgactctggcaagaagaggacagcgagacgcagacgcagtcctcggaggggccggcggagacgacgagggagctcctcgagcgaaagctcagagagcagcgagtcctcaacctccaactccagcaattcgccgtacaactcgccaagacccaagcgaacctccacataa

SEQ ID NO: 108 - DNA, 465 bp, Torque teno virus
  source 1..465: mol_type = other DNA
atgtacttttccagaaaaagaagacccaagaaggagaggccgctgccactgcgatacgtgtgtggcctaccgcctagcaggcctgatccgatgagctggcgtccacctgcccacgatgtcccaggacaagagggcctgtggtaccgatcagtttttacttctcatggcgctttttgtggttgcggtgattttgtgggtcatcttcagagacttagcgaacgcctgggtagaccccaaccaccaagaccaccgggcgagccgccgggccctgctgtgagagttctgcctgccctgccgcctccagtacctgaaccaagaagacacgtccagagagagaacccgggatgtggtggtggagacgccgcagatggagggccccatggagaaggaggcgatggagacgacgcagacctcggaccagaagatttagacgagctgctcgacgtcctagacgccccagagtaa

SEQ ID NO: 109 - DNA, 2163 bp, Torque teno virus
  source 1..2163: mol_type = other DNA
atgtggtggtggagacgccgcagatggagggccccatggagaaggaggcgatggagacgacgcagacctcggaccagaagatttagacgagctgctcgacgtcctagacgccccagagtaaggagacctcggcgccgcagggggtgggctcgtagatatagacttagaaggaggcgaaggaggagaagaaggagaaagcttatactaacacaatggcagccagcaaaaataagaaaatgtctagtaataggttatcttgctctagtactatgtgggaacgggacattcagtaaaaactatgcctcccactcagatgactatgtacagaaaggaccctttggagggggactgagcagcatgagatttaacatgagaatactatatgatcaatttaaaagacaccttaacttctggacacacacaaaccaggacctagacctagttagatacagaggctgcaccatgacattttatagacacccagaggtggacttcatagtaaaattcaacagaaaacctccattcctagacacaatagtatcaggtccagccatgcacccaggcatgctaatgacaacaaaacacaaaatactagtaaaaagctttaaaacaaaacccaaaggaaaaggcacagtaaaggtgcgcattcgcccccccacactctttgacgaccgttggtactttcaacatgacatctgcaaaaccacactgttcaccattagcgcaacaccatgtgacctgcggtttccgttctgctcaccacaaactgacaacccttgcgtcaacttcctagttcttgcaggagtgtataacggcaaacttagcatagaacccacaaacgtagaatcacaatataattcactactttcagctatagagacacacacccaaggcactctatttaatacatttaaaacaccagaaatgataaagtgccccccagcagtaaaagccccagaaactggagacatatccacaaactgctacaaaaaactagacatcgcctggggagacactatatggaaccaaagcaccataggcaactttaaaaagaacacagagaacttgtggaatgcaagacacaatcaaacaatgactggtagcaaatacctaaactacagaacaggaatatacagtgccatattcctttcagcaggcagactgtcaccagactttccaggactatacaatgacatagtatacaatcccaccacagacgaaggcataggaaacattgtgtggatagactggtgtacaaaagcagactgcaacttcaatgagacacagtccaaaggagtaataaaagacattccactgtgggcagcactgtttggctatgtagactttctaaaaaagacatttaaagacgaccagctagacaaaactgccagactcactctcataagcccctatacaaagcctcaactaataggacctacacaacccaacaaagggtttgttccgtacgactacaactttggcagagcacacatgccctccggagaatcctacatacctatgtactacagatttagatggtacatctgcctatttcaccaacaaaagtttatagacgacattgtaagcagcgggcccttcgcataccacggctcacagccctcagcaactctcaccactaaatacaaattccactttctctttgggggcaaccccgttccccaacagactgtcagagacccttgtaaccaaccagtctttgacattcccggagccggtggactccctcgtccgatacaagtcgttgacccgaaatacgtcaacgaaggctacacgttccacgcctgggacttccgtagagggctctttggccaagcagctattaaaagagtgtcgggagaacaaacaaatgcttcactttattcatcaggtccaaaacggccaagaacagaaattcctccagaaaatgcagaagaaggctcatattccagggaacaaaaactccagccctggctcgactcgagcgaccaggaagagagcgagacagaagccccagaagaagaagcgacctcgccgccgtcgctacagctccagctcaagcagcagatcagggagcagcgacaactcagatgtggaatccaacacctcttccagcaactagtgaaaacccagcaaaacttgcatatcgacccatgcctacaatag

SEQ ID NO: 110 - DNA, 465 bp, Torque teno virus
  source 1..465: mol_type = other DNA
atgtacttttccagaaaaagaagacccaagaaggagaggccgctgccactgcgatacgtgtgtggcctaccgcctagcaggcctgatccgatgagctggcgtccacctgcccacgatgtcccaggacaagagggcctgtggtaccgatcagtttttacttctcatggcgctttttgtggttgcggtgattttgtgggtcatcttcagagacttagcgaacgcctgggtagaccccaaccaccaagaccaccgggcggaccgccgggccctgctgtgagagctctgcctgccctgccgcctccggaacctgaaccaagaagacacgtccagagagagaacccgggatgtggtggtggagacgccgcagatggagggccccatggagaaggaggcgatggagacgacgcagacctcggaccagaagatttagacgagctgctcgacgtcctagacgccccagagtaa

SEQ ID NO: 111 - DNA, 2163 bp, Torque teno virus
  source 1..2163: mol_type = other DNA
atgtggtggtggagacgccgcagatggagggccccatggagaaggaggcgatggagacgacgcagacctcggaccagaagatttagacgagctgctcgacgtcctagacgccccagagtaaggagacctcggcgccgcagggggtgggctcgtagatatagacttagaaggaggcggaggaggagaagaaggagaaagcttatactaacacaatggcagtcagcaaaaataagaaaatgtctagtaataggttatcttgctctagtactatgtggaaacgggacattcagtaaaaactatgcctcgcactcagatgactatgtacagaaaggaccctttggagggggactaagcagcatgagatttaacatgagaatactatatgatcaatttaaaagacaccttaacttctggacacacacaaaccaggacctagacctagttagatacagaggctgcaccatgacattttatagacacccagaggtggacttcatagtaaaattcaacagaaaacctccattcctagacacaatagtatcaggtccagccatgcacccaggcatgctaatgacaacaaaacacaaaatactagtaaaaagctttaaaacaaaacccaaaggaaaaggcacagtaaaggtgcgcattcgcccccccacactctttgacgaccgttggtactttcaacatgacatctgcaaaaccacactgttcaccattagcgcaacaccatgtgacctgcggtttccgttctgctcaccacaaactgacaacccttgcgtcaacttcctagttcttgcaggagtgtataacggcaaacttagcatagaagccacaaagttagaatcacaatataattcactagtttcatctatagaaatacccacccaaggcactctatttaatacatttaaaacaccagaaatgataaagtgccccccagcagtaaaagccttagaacattcagacgtaaacagaagctgctacaaaaaactagacagcgcctggggagacactatatggaaccagaacaccatacagaactttaaagaaaacacagacaagttgtgggaagcaagaggcaaccaaacaatgactggtagcaaatacctaaactacagaacaggaatatacagtgccatattcctttcagcaggcagactgtcaccagactttgggggactatacaatgacatagtatacaatcccaccacagacgaaggcataggaaacattgtgtggatagactggtgtacaaaagcagactgcaacttcaatgagacacagtccaaaggagtaataaaagacattccactgtgggcagcactgtttggctatgtagactttctaaaaaagacatttaaagacgaacagctagacaaaattgccagactcactctcataagcccctatacaaagcctcaactaataggacctacacaacccaacaaagggtttgttccgtacgactacaactttggcagagcacacatgccctccggagaatcctacatacctatgtactacagatttagatggtacatctgcctatttcaccaacaaaagtttatagacgacattgtaagcagcgggcccttcgcataccacggctcacagccctcagcaactctcaccactaaatacaaattccactttctctttgggggcaaccccgttccccaacagactgtcagagactcttgtaaccaaccagtctttgacattcccggagccggtggactccctcgtccgatacaagtcgttgacccgaaatacgtcaacgaaggctacacgttccacgcctgggacttccgtagagggctctttggccaagcagctattaaaagagtgtcgggagaacaaacaaatgcttcactttattcatcaggtccaaaacggccaagaacagaaattcctccacaaaatgcagaagaaggctcatattccagggaacaaaaactccagccctggctcgactcgagcgaccaggaagagagcgagacagaagccccagaagaagaagcgacctcgccaccgtcgctacagctccagctcaagcagcagatcagggagcagcgacaactcagatgtggaatccaacacctcttccagcaactagtgaaaacccagcaaaacttgcatatcaatccatgcctacagtag

SEQ ID NO: 112 - DNA, 465 bp, Torque teno virus
  source 1..465: mol_type = other DNA
atgtacttttccagaaaaagaagacccaagaaggagaggccgctgccactgcgatacgtgtgtggcctaccgcctagcaggcctgatccgatgagctggcgtccacctgcccacgatgtcccaggacaagagggcctgtggtaccgatcagtttttacttctcatggcgctttttgtggttgcggtgattttgtgggtcatcttcagagacttagcgaacgcctgggtagaccccaaccaccaagaccaccgggcggaccgccgggccctgctgtgagagctctgcctgccctgccgcctccggagcctgaaccaagaagacacgtccagagagagaacccgggatgtggtggtggagacgccgcagatggagggccccatggagaaggaggcgatggagacgacgcagacctcggaccagaagatttagacgagctgctcgacgtcctagacgccccagagtaa

SEQ ID NO: 113 - DNA, 669 bp, Torque teno virus
  source 1..669: mol_type = other DNA
atgtggtggtggagacgccgcagatggagggccccatggagaaggaggcgatggagacgacgcagacctcggaccagaagatttagacgagctgctcgacgtcctagacgccccagagtaaggagacctcggcgccgcagggggtgggctcgtagatatagacttagaaggaggcggaggaggagaagaaggagaaagcttatactaacacaatggcagccagcaaaaataagaaaatgtctagtaataggttatcttgctctagtactatgtggaaacgggacattcagtaaaaactatgcctcgcactcagatgactatgtacagaaaggaccctttggagggggactaagcagcatgagatttaacatgagaatactatatgatcaatttaaaagacaccttaacttctggacacacacaaaccaggacctagacctagttagatacagaggctgcaccatgacattttatagacacccagaggtggacttcatagtaaaattcaacagaaaacctccattcctagacacaatagtatcaggtccagccatgcacccaggcatgctaatgacaacaaaacacaaaatactagtaaaaagctttaaaacaaaacccaaaggaaaaggcacagtaaaggtacgcattcgccccccccacactctttga

SEQ ID NO: 114 - DNA, 1239 bp, Torque teno virus
  source 1..1239: mol_type = other DNA
atgataaagtgccccccagcagtaaaagccttagaacattcagacgtaaacagaaactgctacaaaaaactagacagcgcctggggagacactatatggaaccagaacaccatacagaactttaaagaaaacacagacaagttgtgggaagcaagaggcaaccaaacaatgactggtagcaaatacctaaactacagaacaggaatatacagtgccatattcctttcagcaggcagactgtcaccagactttgggggactatacaatgacatagtatacaatcccaccacaggcgaaggcatagaaaacattgtgtggatagactggtgtacaaaagcagactgcaacttcaatgagacacagtccaaaggagtaataaaagacattccactgtgggcagcactgtttggctatgtagactttctaaaaaagacatttaaagacgaacagctagacaaaattgccagactcactctcataagcccctatacaaagcctcaactaataggacctacacaacccaacaaagggtttgttccgtacgactacaactttggcagagcacacatgccctccggagaatcctacatacctatgtactacagatttagatggtacacctgcctatttcaccaacaaaagtctatagacgacattgtaagcagcgggcccttcgcataccacggctcacagccctcagcaactctcaccactaaatacaaattccactttctctttgggggcaaccccgttccccaacagactgtcagagacccttgtaaccaaccaatctttgacattcccggagccggtggactccctcgtccgatacaagtcgttgacccgaaatacgtcaacgaaggctacacgttccacgcctgggacttccgtagagggctctttggccaagcagctattaaaagagtgtcgggagaacaaacaaatgcttcactttattcatcaggtccaaaacggccaagaacagaaattcctccacaaaatgcagaagaaggctcatattccagggaacaaaaactccagccctggctcgactcgagcgaccaggaagaaagcgagacagaagccccagaagaagaagcgacctcgccaccgtcgctacagctccagctcaagcagcagatcagggagcagcgacaactcagatgtggaatccaacacctcttccagcaactagtgaaaacccagcaaaacttgcatatcaacccatgcctacaatag

SEQ ID NO: 115 - DNA, 465 bp, Torque teno virus
  source 1..465: mol_type = other DNA
atgtacttttccagaaaaagaagacccaagaaggagaggccgctgccactgcgatacgtgtgtggcctaccgcctagcaggcctgatccgatgagctggcgtccacctgcccacgatgtcccaggacaagagggcctgtggtaccgatcagtttttacttctcatggcgctttttgtggttgcggtgattttgtgggtcatcttcagagacttagcgaacgcctgggtagaccccaaccaccaagaccaccgggcggaccgccgggccctgctgtgagagctctgcctgccctgccgcctccggagcctgaaccaagaagacacgtccagagagagaacccgggatgtggtggtggagacgccgcagatggagggccccatggagaagaaggcgatggagacgacgcagacctcgggccagaagatttagacgagctgctcgacgtcctagacgccccagagtaa

SEQ ID NO: 116 - DNA, 2163 bp, Torque teno virus
  source 1..2163: mol_type = other DNA
atgtggtggtggagacgccgcagatggagggccccatggagaagaaggcgatggagacgacgcagacctcgggccagaagatttagacgagctgctcgacgtcctagacgccccagagtaaggagacctcggcgccgcagggggtgggctcgtagatatagacttagaaggaggcggaggaggagaagaaggagaaagcttatactaacacaatggcagccagcaaaaataagaaaatgtctagtaataggttatctcgctctagtactatgtggaaacgggacattcagtaaaaactatgccacgcactcagatgactatgtacagaaaggaccctttggagggggactaagcagcatgagatttaacatgagaatactatatgatcaatttaaaagacaccttaacttctggacacacacaaaccaggacctagacctagttagatacagaggctgcaccatgacattttatagacacccagaggtggacttcatagtaaaattcaacagaaaacctccattcctagacacaatagtatcaggtccagccatccacccaggcatgctaatgacaacaaaacacaaaatactagtaaaaagctttaaaacaaaacccaaaggaaaaggcacagtaaaggtgcgcattcgcccccccacactctttgacgaccgttggtactttcaacatgacatctgcaaaaccacactgttcaccattagcgcaacaccatgtgacctgcggtttccgttctgctcaccacaaactgacaacccttgcgtcaacttcctagttcttgcaggagtgtataacggcaaacttagcatagaagccacaaagttagaatcacaatataattcactagtttcatctatagaaatacccacccaaggcactctatttaatacatttaaaacaccagaaatgataaagtgccccccagcagtaaaagccttagaacattcagacgtaaacagaaactgctacaaaaaactagacagcgcctggggagacactatatggaaccagaacaccatacagaactttaaagaaaacacagacaagttgtgggaagcaagaggcaaccaaacaatgactggtagcaaatacctaaactacagaacaggaatatacagtgccatattcctttcagcaggcagactgtcaccagactttgggggactatacaatgacatagtatacaatcccaccacagacgaaggcataggaaacattgtgtggatagactggtgtacaaaagcagactgcaacttcaatgagacacagtccaaaggagtaataaaagacattccactgtgggcagcactgtttggctatgtagactttctaaaaaagacatttaaagacgaacagctagacaaaattgccagactcactctcataagcccctatacaaagcctcaactaataggacctacacaacccaacaaagggtttgttccgtacgactacaactttggcagagcacacatgccctccggagaatcctacatacctatgtactacagatttagatggtacatctgcctatttcaccaacaaaagtttatagacgacattgtaagcagcgggcccttcgcataccacggctcacagccctcagcaactctcaccactaaatacaaattccactttctctttgggggcaaccccgttccccaacagactgtcagagacccttgtaaccaaccagtctttgacattcccggagccggtggactcccccgtccgatacaagtcgttgacccgaaatacgtcaacgaaggctacacgttccacgcctgggacttccgtagagggctctttggccaagcagctattaaaagagtgtcgggagaacaaacaaatgcttcactttattcatcaggtccaaaacggccaagaacagaaattcctccacaaaatgcagaagaaggctcatattccagggaacaaaaactccagccctggctcgactcgagcgaccaggaagagagcgagacagaagccccagaagaagaagcgacctcgccaccgtcgctacagctccagctcaagcagcagatcagggagcagcgacaactcagatgtggaatccaacacctcttccagcaactagtgaaaacccagcaaaacttgcatatcaatccatgcctacagtag

SEQ ID NO: 117 - DNA, 465 bp, Torque teno virus
  source 1..465: mol_type = other DNA
atgtacttttccagaaaaagaagacccaagaaggagaggccgctgccactgcgatacgtgtgtggcctaccgcctagcaggcctgatccgatgagctggcgtccacctgcccacgatgtcccaggacaagagggcctgtggtaccgatcagtttttacttctcatggcgctttttgtggttgcggtgattttgtgggtcatcttcagagacttagcgaacgcctgggtagaccccaaccaccaagaccaccgggcgaaccgccgggccctgctgtgagagttctgcctgccctgccgcctccggtacctgaaccaagaagacacgtccagagagagaacccgggatgtggtggtggagacgccgcagatggagggccccatggagaaggaggcgatggagacgacgcagacctcggaccagaagatttagacgagctgctcgacgtcctagacgccccagagtaa

SEQ ID NO: 118 - DNA, 2163 bp, Torque teno virus
  source 1..2163: mol_type = other DNA
atgtggtggtggagacgccgcagatggagggccccatggagaaggaggcgatggagacgacgcagacctcggaccagaagatttagacgagctgctcgacgtcctagacgccccagagtaaggagacctcggcgccgcagggggtgggctcgtagatatagacttagaaggaggcgaaggaggagaagaaggagaaagcttatactaacacaatggcagccagcaaaaataagaaaatgtctagtaataggttatcttgctctagtactatgtgggaacgggacattcagtaaaaactatgcctcccactcagatgactatgtacagaaaggaccctttggagggggactaagcagcatgagatttaacatgagaatactatatgatcaatttaaaagacaccttaacttctggacacacacgaaccaggacctagacctagttagatacagaggctgcaccatgacattttatagacacccagaggtggacttcatagtaaaattcaacagaaaacctccattcctagacacaatagtatcaggtccagccatgcacccaggcatgctaatgacaacaaaacacaaaatactagtaaaaagctttaaaacaaaacccaaaggaaaaggcacagtaaaggtgcgcattcgcccccccacactctttgacgaccgttggtactttcaacatgacatctgcaaaaccacactgttcaccattagcgcaacaccatgtgacctgcggtttccgttctgctcaccacaaactgacaacccttgcgtcaacttcctagttcttgcaggagtgtataacggcaaacttagcatagaacccacaaacgtagaatcacaatataattcactactttcagctatagagacgaacacccaaggcactctatttaatacatttaaaacaccagaaatgataaagtgccccgcagcaggaaaagccccagaaactggagacatatccacaaactgctacaaaaaactagacagcgcctggggagacactatatggaaccaaaacaccatagccaactttaaaaagaacacagacaacttgtggaatgcaggacacaatcaaacaatgactggtagcaaatacctaaactacagaacaggaatatacagtgccatattcctttcagcaggcagactgtcaccagactttccaggactatacgatgacatagtatacaatcccaccacagacgaaggcataggaaacattgtgtggatagactggtgtacaaaagcagactgcaacttcaatgagacacagtccaaaggagtaataaaagacattccactgtgggcagcactgtttggctatgtagactttctaaaaaagacatttaaagacgaccagctagacaaaactgccagactcactctcataagcccctatacaaagcctcaactaataggacctacacaacccaacaaagggtttgttccgtacgactacaactttggcagagcacacatgccctccggagaatcctacatacctatgtactacagatttagatggtacatctgcctatttcaccaacaaaagtttatagacaacattgtaagcagcgggcccttcgcataccacggctcacagccctcagcaactctcaccactaaatacaaattccactttctctttgggggcaaccccgttccccaacagactgtcagagacccttgtaaccaaccagtctttgacattcccggagccggtggactccctcgtccgatacaagtcgttgacccgaaatacgtcaacgaaggctacacgttccacgcctgggacttccgtagagggctctttggccaagcagctattaaaagagtgtcgggagaacaaacaaatgcttcactttattcatcaggcccaaaacggccaagaacagaaattcctccagaaaatgcagaagaaggctcatattccagggaacaaaaactccagccctggctcgactcgagcgaccaggaagggagcgagacagaagccccagaagaagaagcgacctcgccgccgtcgctacagctccagctcaagcagcagatcagggagcagcgacaactcagatgtggaatccaacacctcttccagcaactagtgaaaacccagcaaaacttgcatatcaacccatgcctacaatag

SEQ ID NO: 119 - DNA, 465 bp, Torque teno virus; identical to SEQ ID NO: 112
  source 1..465: mol_type = other DNA

SEQ ID NO: 120 - DNA, 2163 bp, Torque teno virus
  source 1..2163: mol_type = other DNA
atgtggtggtggagacgccgcagatggagggccccatggagaaggaggcgatggagacgacgcagacctcggaccagaagatttagacgagctgctcgacgtcctagacgccccagagtaaggagacctcggcgccgcagggggtgggctcgtagatatagacttagaaggaggcggaggaggagaagaaggagaaagcttatactaacacaatggcagccagcaaaaataagaaaatgtctagtaataggttatcttgctctagtactatgtggaaacgggacattcagtaaaaactatgcctcgcactcagatgactatgtacagaaaggaccctttggagggggactaagcagcatgagatttaacatgagagtactatatgatcaatttaaaagacaccttaacttctggacacacacaaaccaggacctagacctagttagatacagaggctgcaccatgacattttatagacacccagaggtggacttcatagtaaaattcaacagaaaacctccattcctagacacaatagtatcaggtccagccatgcacccaggcatgctaatgacaacaaaacacaaaatactagtaaaaagctttaaaacaaaacccaaaggaaaaggcacagtaaaggtgcgcattcgcccccccacactctttgacggccgttggtactttcaacatgacatctacaaaaccacactgttcaccattagcgcaacaccgtgtgacctgcggtttccgttctgctcaccacaaactgacaacccttgcgtcaacctcctagttcttgcaggagtgtataacggcaaacttagcatagaagccacaaagttagaatcacaatataattcactagtttcatctatagaaatacccacccaaggcactctatttaatacatttaaaacaccagaaatgataaagtgccccccagcagtaaaagcctcagaacattcagacgtaaacagaaactgctacaaaaaactagacagcgcctggggagacactatatggaacccgagcaccatacagaactttaaagaaaacacagagaagttgtgggaagcaagaggcaaccaaacaatgactggtagcaaatacctaaactacagaacaggaatatacagtgccatattcctttcagcaggcagactgtcaccagactttgggggactatacaatgacatagtatacaatcccaccacagacgaaggcataggaaacattgtgtggatagactggtgtacaaaagcagactgcaacttcaatgagacacagtccaaaggggtaataaaagacattccaccgtgggcagcactgtttggctatgtagactttctaaaaaagacatttaaagacgaacagctagacaaaattgccagactcactctcataagcccctatacaaagcctcaactaataggacctacacaacccaacaaagggtttgttccgtacgactacaactttggcagagcacacatgccctccggagaatcctacatacctatgtactacagatttagatggtacatctgcctatttcaccaacaaaagtttatagacgacattgtaagcagcgggcccttcgcataccacggctcacagccctcagcaactctcaccactaaatacaaattccactttctctttgggggcaaccccgttccccaacagactgtcagagacccttgtaaccaaccagtctttgacattcccggagccggtggactccctcgtccgatacaagtcgttgacccgaaatacgtcaacgaaggctacacgttccacgcctgggacttccgtagagggctctttggccaagcagctattaaaagagtgtcgggagaacaaacaaatgcttcactttattcatcaggtccaaaacggccaagaacagaaattcctccacaaaatgcagaagaaggctcatattccagggaacaaaaactccagccctggctcgactcgagcgaccaggaagagagcgagacagaagccccagaagaagaagcgacctcgccaccgtcgctacagctccagctcaagcagcagatcagggagcagcgacaactcagatgtggaatccaacacctcttccagcaactagtgaaaacccagcaaaacttgcatatcaacccatgcctacaatag

SEQ ID NO: 121 - DNA, 447 bp, Torque teno virus
  source 1..447: mol_type = other DNA
atgcgttttcgcagggttgcccagaaaaggaaagtgcttttgcaaactgtgccagctgcaaagaaggctaggcggcttctaggtatgtggcagccccccacgcacaatgtcccgggcatcgagagaaactggtacgagagctgttttagatcccacgctgctgtttgtggctgtggcgattttgttggccatcttaatcatctggcaactactctgggtcgtcctccgcgtcctgggcccccaggcggaccccgcacgccgcaaataagaaacctgccagcgctcccggcgccccagggcgagcccggtgacagagcgtcatggcgtggggcttctggggccgacgccgccggtggagacgatggagagcgcggcgcagacggtggagaccccgcagacgtaggagacgacgccctcctcgccgctttcgagctcgtcgaagagtaa

SEQ ID NO: 122 - DNA, 2211 bp, Torque teno virus
  source 1..2211: mol_type = other DNA
atggcgtggggcttctggggccgacgccgccggtggagacgatggagagcgcggcgcagacggtggagaccccgcagacgtaggagacgacgccctcctcgccgctttcgagctcgtcgaagagtaaggaggcgcggggggaggtggcgcagacgctacagaaaatggcgacggggcagacgcagacggactcacagaaaaaagatagtcataaaacagtggcaacctaactttataagacgctgctacatcatagggtacttaccacttatattctgcggcgaaaatacaaccgcccagaactttgccactcactcggacgacatgataagcaaaggaccgtacggggggggcatgactaccaccaaattcactctgagaatactgtacgacgagtttaccaggtttatgaacttttggactgtcagtaacgaagacctagacctgtgtagatacgtgggctgcaaactaatattttttaaacaccccacggtggactttatagtacagataaacactcagcctcctttcttagacacgcacctcaccgcggccagcatacacccgggcatcatgatgctcagcaagagacacatactaataccctctctaaagacccggcccagcagaaaacacagggtggtcgtcagggtgggcgccccaagactttttcaggacaagtggtacccccagtcagacctgtgtgacacagttctgctttccatattcgcaaccgcctgcgacttgcaatatccgttcggctcaccactaactgacaacccttgcgtcaacttccagatcctggggccccagtacaaaaaacaccttagtattagctccactatggatgacactaacaaagcacattatgaagaaaacttatttaagaaaattgaactatacaacacctttcaaaccatagctcagcttaaagagacaggaacaatttcaggcatgcaaccttcttggactgaagtccagaattcaaaaacacttaatgaaacaggtagcaatgccactgagagtagagacacttggtataaaggaaatacatacaacgacaagatacaccagttagcagaaaaaaccagaaagagatttaaaaatgcaacaaaagcagcactaccaaactaccccacaataatgtccgcagacttatatgaataccactcaggcatatactccagcatatatctatcagctggcaggagctactttgaaaccaccggggcctactctgacattatatacaaccctttcacagacaagggcacaggcaacataatctggatagactacctcacaaaagaagacaccatttttgtaaaaaacaaaagcaaatgcgagataatggacatgcccctgtgggcggcctgcacaggatacacagagttttgtgcaaagtatacaggcgactctgccattatttacaatgcaagaatagtcataagatgcccatacactgagcccatgttaatagaccactcagacccaaacaaaggcttcgttccctactcatttagctttggcaacggaaagatgcccggaggcagctccaacgtgcccataagaatgagagccaagtggtacgtgaacatattccaccaaaaagaagtattggagagcatagtacagtccggaccgtttgggtacaagggcgacataaaatcagctgtactagccatgaaatacagatttcactggaagtggggcggaaaccctatatccaaacaggtcgtcaggaatccctgctccaactccagctcatccgcggcccatagaggacctcgcagcgtacaagcggttgacccgaaatacaataccccagaggtcacgtggcactcgtgggacattagacgaggactctttggcaaagcaggtattaaaagaatgcaacaggaatcagatgctctttacattcctccaggaccaatcaagagacctcgcagggacaccaacgcccaagacccagaagagcaaaacgaaagctcaggtttcagagtccagcagcgactcccgtgggtccactccagccaagagacgcaaagctcccaagaagagacggaggcgcaggggtcggtacaagaccaactactcctccagctccgagagcagcgagttctccgactccagctccagcaactcgcaacccaagtcctcaaagtccaagcagggcacagcctacaccccctattatcttcccaagcataa

SEQ ID NO: 123 - DNA, 447 bp, Torque teno virus
  source 1..447: mol_type = other DNA
atgcgttttcgcagggttgcccagaaaaggaaagtgcttttgcaaactgtgccagctgcaaagaaggctaggcggcttctaggtatgtggcagccccccacgcataatgtcccgggcatcgagagaaactggtacgagagctgttttagatcccacgctgctgtttgtggctgtggcgattttgttggccatcttaatcatctggcaactactctgggtcgtcctccgcgtcctgggcccccaggcggaccccgcacgccgcaaataagaaacctgccagcgctcccggcgccccagggcgagcccggtgacagagcgtcatggcgtggggcttctggggccgacgccgccggtggagacgatggagagcgcggcgcagacggtggagaccccgcagacgtaggagacgacgccctcctcgccgctttcgagctcgtcgaagagtaa

SEQ ID NO: 124 - DNA, 2211 bp, Torque teno virus
  source 1..2211: mol_type = other DNA
atggcgtggggcttctggggccgacgccgccggtggagacgatggagagcgcggcgcagacggtggagaccccgcagacgtaggagacgacgccctcctcgccgctttcgagctcgtcgaagagtaaggaggcgcggggggaggtggcgcagacgctacagaaaatggcgacggggcagacgcagacggactcacagaaaaaagatagtcataaaacagtggcaacctaactttataagacgctgctacatcatagggtacttaccacttatattctgcggcgaaaatacaaccgcccagaactttgccactcactcggacgacatgataagcaaaggaccgtacggggggggcatgactaccaccaaattcactctgagaatactgtacgacgagtttaccaggtttatgaacttttggactatcagtaacgaagacctagacctgtgtagatacgtgggctgcaaactaatattttttaaacaccccacggtggactttatagtacagataaacactcagcctcctttcttagacacgcacctcaccgcggccagcatacacccgggcatcatgatgctcagcaagagacacatactaataccctctctaaagacccggcccagcagaaaacacagggtggtcgtcagggtgggcgccccaagactttttcaggacaagtggtacccccagtcagacctgtgtgacacagttctgctttccatattcgcaaccgcctgcgacttgcaatatccgtttggctcaccactaactgacaacccttgcgtcaacttccagatcctggggccccagtacaaaaaacaccttagtattagctccactatggatgaaagtaacatatcacattataaagaaaacttatttaagaaaactgaactatacaacacctttcaaaccatagctcagcttaaagagacaggaaacatttcaggcattagtcctaattggactgaagtccagaattcaacaacacttaatcaaacaggtgacaatgccactaacagtagagacacttggtataaaggaaatacatacaaccacaagatatgcgacttagcagaaaaaaccagaaacagatttaaaaatgcaaccaaagcagcactaccaaactaccccacaataatgtccacagacctatatgaataccactcaggcatatactccagcatatatttatcagctggcaggagctactttgaaaccaccggggcctactctgacattatatacaaccctttcacagacaaaggcacaggcaacataatctggatagactacctcacaaaagaagacaccatttttgtaaaaaacaaaagcaaatgcgagataatggacatgcccctgtgggcggcctgcacaggatacacagagttttgtgcaaagtatacaggcgactctgccattatctacaatgcaagaatactcataagatgcccatacactgagcccatgttaatagaccactcagacccaaacaaaggcttcgttccctactcatttaactttggcaacggaaagatgcccggaggcagctccaacgtacccataagaatgagagccaaatggtacgcgaacatattccaccaaaaggaggttctagaggctatagtacaaagcggaccgttcgggtacaagggcgacataaaatcagctgtactagccatgaaatacagatttcactggaagtggggcggaaaccctatatccaaacaggtcgtcaggaatccctgctccaactccagctcatccgcggcccatagaggacctcgcagcgtacaagcggttgacccgaaatacaataccccagaggtcacgtggcactcgtgggacattagacgaggactctttggcaaagcaggtattaaaagaatgcaacaggaatcagatgctctttacattcctccaggaccaatcaagagacctcgcagggacaccaacgcccaagacccagaagagcaaaacgaaagctcaggtttcagagtccagcagcgactcccgtgggtccactccagccaagagacgcaaagctcccaagaagagacggaggcgcaggggtcggtacaagaccaactactcctccagctccgagagcagcgagttctccgactccagctccagcaactcgcagcccaagtccccaaagtccaagcagggcacagcctacaccccctattatcttcccaagcataa

SEQ ID NO: 125 - DNA, 447 bp, Torque teno virus; identical to SEQ ID NO: 121
  source 1..447: mol_type = other DNA

SEQ ID NO: 126 - DNA, 2211 bp, Torque teno virus
  source 1..2211: mol_type = other DNA
atggcgtggggcttctggggccgacgccgccggtggagacgatggagagcgcggcgcagacggtggagaccccgcagacgtaggagacgacgccctcctcgccgctttcgagctcgtcgaagagtaaggaggcgcggggggaggtggcgcagacgctacagaaaatggcgacggggcagacgcagacggactcacagaaaaaagatagtcataaaacagtggcaaccaaactttataagacgctgctacatcatagggtacttaccacttatattctgcggcgaaaatacaaccgcccagaactttgccactcactcggacgacatgataagcaaaggaccgtacggggggggcatgactaccaccaaattcactctgagaatactgtacgacgagtttaccaggtttatgaacttttggactgtcagtaacgaagacctagacctgtgtagatacgtgggctgcaaactaatattttttaaacaccccacggtggactttatagtacagataaacactcagcctcctttcttagacacgcacctcaccgcggccagcatacacccgggcatcatgatgctcagcaagagacacatactaataccctctctaaagacccggcccagcagaaaacacagggtggtcgtcagggtgggcgccccaagactttttcaggacaagtggtacccccagtcagacctgtgtgacacagttctgctttccatattcgcaaccgcctgcgacttgcaatatccgttcggctcaccactaactgacaacccttgcgtcaacttccagatcctggggccccagtacaaaaaacaccttagtattagctccactatggatgacactaacaaagcacattatgaagaaaacttatttaataaaactgaactatacaacacctttcaaaccatagctcagcttagagacacaggacaaactacaaacgctagtcctaattggaatcaggtccagaatacagcagcacttgagttatcaggtgcaaatgccactagcagcaaagacacttggtataaaggtaatacatacacgaaagacatatcaaagttagcagaaaaaaccagacaaagatttaaagctgcaacaatagcagcactaccaaactaccccacaataatgtccacagacctatatgaataccactcaggcatatactccagcatatatttatcagctggcaggagctactttgaaaccaccggggcctactctgacattatatacaaccctttcacagacaaaggcacaggcaacataatctggatagactacctcacaaaagaagacaccatttttgtaaaaaacaaaagcaaatgcgagataatggacatgcccctgtgggcggcctgcacaggatacacagagttttgtgcaaagtatacaggcgactctgccattatctacaatgcaagaatactcataagatgcccacacactgagcccatgttaatagaccactcagacccaaacaaaggcttcgttccctactcattcgactttggcaatggaaagatgcccggaggcagctccaacgtaccgataagaatgagggccaaatggtacgtgaacatattccaccaaaaggaggttctagaggctatagtacaaagcggaccgttcgggtacaagggcgacataaaatcagctgtactagccatgaaatacagatttcactggaagtggggcggaaaccctatatccaaacaggtcgtcaggaatccctgctccaactccagctcatccgcggcccatagaggacctcgcagcgtacaagcggttgacccgaaatacaataccccagaggtcacgtggcactcgtgggacattagacgaggactctttggcaaagcaggtattaaaagaatgcaacaggaatcagatgctctttacattcctccaggaccaatcaagagacctcgcagggacaccaacgcccaagacccagaagagcaaaacgaaagctcaggtttcagagtccagcagcgactcccgtgggtccactccagccaagagacgcaaagctcccaagaagagacggaggcgcaggggtcggtacaagaccaactactcctccagctccgagagcagcgagttctccgactccagctccagcaactcgcaacccaagtcctcaaagtccaagcagggcacagcctacaccccctattatcttcccaagcataa

SEQ ID NO: 127 - DNA, 447 bp, Torque teno virus
  source 1..447: mol_type = other DNA
atgcgttttcgcagggttgcccagaaaaggaaagtgcttttgcaaactgtgccagctgcaaagaaggctaggcggcttctaggtatgtggcagccccccacgcacaatgtcccgggcatcgagagaaactggtacgagagctgttttagatcccacgctgctgtttgtggctgtggcgattttgttggccatcttaatcatctggcaactactctgggtcgtcctccgtgtcctgggcccccaggcggaccccgcacgccgcaaataagaaacctgccagcgctcccggcgccccagggcgagcccggtgacagagcgccatggcgtggggcttctggggccgacgccgccggtggagacgatggagagcgcggcgcagacggtggagaccccgcagacgtaggagacgacgccctactcgccgctttcgagctcgtcgaagagtaa

SEQ ID NO: 128 - DNA, 2211 bp, Torque teno virus
  source 1..2211: mol_type = other DNA
atggcgtggggcttctggggccgacgccgccggtggagacgatggagagcgcggcgcagacggtggagaccccgcagacgtaggagacgacgccctactcgccgctttcgagctcgtcgaagagtaaggaggcgcggggggaggtggcgcagacgctacagaaaatggcgacggggcagacgcagacggactcatagaaaaaagatagtcataaaacagtggcaaccaaactttataagacgctgctacatcatagggtacttaccacttatattctgcggcgaaaatacaaccgcccagaactttgccactcgctcggacgacatgataagcaaaggaccgtacggggggggcatgactaccaccaaattcactctgagaatactgtacgacgagtttaccaggtttatgaacttttggactgtcagtaacgaagacctagacctgtgtagatacgtgggctgcaaactaatattttttaaacaccccacggtggactttatagtacagataaacactcagcctcctttcttagacacgcacctcaccgcggccagcatacacccgggcatcatgatgctcagcaagagacacatactaataccctctctaaagacccggcccagcagaaaacacagggtggtcgtcagggtgggcgccccaagactttttcaggacaagtggtacccccagtcagacctgtgtgacacagttctgctttccatattcgcaaccgcctgcgacttgcaatatccgttcggctcaccactaactgacaacccttgcgtcaacttccagatcctggggccccagtacaaaaaacaccttagtattagctccactatggatgaaagtaacaaagcacattatgaacaaaacttatttaagaaaactgaactatacaacacctttcaaaccatagctcagcttaaagagacaggaaacatttcaggcattactcctacttggactgaagtccagaattcaacaacacttaatcaagcaggtaacaatgccactgacagtagagacacttggtataaaggaaatacatacaacgagaagatatccgagttagcacaaataaccagaaacagatttaaaaatgcaaccaaaacagcactaccaaactaccccacaataatgtccacagacctatatgaataccactcaggcatatactccagcatatatttatcagctggcaggagctactttgaaaccaccggggcctactctgacattatatacaaccctttcacagacaaaggcacaggcaacataatctggatagactacctcacaaaagaagacaccatttttgtaaaaaacaaaagcaaatgcgagataatggacatgcccctgtgggcggcctgcacaggatacacagagttttgtgcaaagtatacaggcgactctgccattatttacaatgcaagaatagtcataagatgcccatacactgagcccatgttaatagaccactcagacccaaacaaaggcttcgtcccctactcatttaactttggcaacggaaagatgcccggaggcagctccaacgtgcccataagaatgagagccaagtggtacgtgaacatattccaccaaaaagaagtattggagagcatagtacagtccggaccgtttgggtacaagggcgacataaaatcagctgtactagccatgaaatacagatttcactggaagtggggcggaaaccctatatccaaacaggtcgtcaggaatccctgctccaactccagctcatccgcggcccatagaggacctcgcagcgtacaagcggttgacccgaaatacaataccccagaggtcacgtggcactcgtgggacattagacgaggactctttggcaaagcaggtattaaaagaatgcaacaggaatcagatgctctttacattcctccaggaccaatcaagagacctcgcagggacaccaacgcccaagacccagaagagcaaaacgaaagctcaggtttcagagtccagcagcgactcccgtgggtccactccagccaagagacgcaaagctcccaagaagagacggaggcgcaggggtcggtacaagaccaactactcctccagctccgagagcagcgagttctccgactccagctccagcaactcgcaacccaagtcctcaaagtccaagcagggcacagcctacaccccctattatcttcccaagcataa

SEQ ID NO: 129 - DNA, 447 bp, Torque teno virus
  source 1..447: mol_type = other DNA
atgcgttttcgcagggttgcccagaaaaggaaagtgcttttgcaaactgtgccagctgcaaagaaggctaggcggcttctaggtatgtggcagccccccacgcacaatgtcccgggcatcgagagaaactggtacgagagctgttttagatcccacgctgctgtttgtggctgtggcgattttgttggccatcttaatcatctggcaactactctgggtcgtcctccgcgtcctgggcccccaggcggaccccgcacgccgcaaataagaaacctgccagcgctcccggcgccccagggcgagcccggtgacagagcgccatggcatggggcttctggggccgacgccgccggtggagacgatggagagcgcggcgcagacggtggagaccccgcagacgtaggagacgacgccctactcgccgctttcgagctcgtcgaagagtaa

SEQ ID NO: 130 - DNA, 2211 bp, Torque teno virus
  source 1..2211: mol_type = other DNA
atggcatggggcttctggggccgacgccgccggtggagacgatggagagcgcggcgcagacggtggagaccccgcagacgtaggagacgacgccctactcgccgctttcgagctcgtcgaagagtaaggaggcgcggggggaggtggcgcagacgctacagaaaatggcgacggggcagacgcagacggactcatagaaaaaagatagtcataaaacagtggcaaccaaactttataagacgctgctacgtcatagggtacttaccacttatattctgcggcgaaaatacaaccgcccagaactttgccactcactcggacgacatgataagcaaaggaccgtacggggggggcatgactaccaccaaattcactctgagaatactgtacgacgagtttaccaggtttatgaacttttggactgtcagtaacgaagacctagacctgtgtagatacgtgggctgcaaactaatattttttaaacaccccacggtggactttatagtacagataaacactcagcctcctttcttagacacgcacctcaccgcggccagcatacacccgggcatcatgatgctcagcaagagacacatactaataccctctctaaagacccggcccagcagaaaacacagggtggtcgtcagggtgggcgccccaagactttttcaggacaagtggtacccccagtcagacctgtgtgacacagttctgctttccatatttgcaaccgcctgcgacttgcaatatccgttcggctcaccactaactgacaacccttgcgtcaacttccagatcctggggccccagtacaaaaaacaccttagtattagctccactatggatcaaactaacgaaaaccattataaagaaaacttatttaacaaaactgaactatacaacacctttcaaaccatagctcagcttaaagagacaggacacatttcaggcattagtcctacttggaatgaagtccagaattcaacaacacttactaaaggaggtgacaatgccactcagagtagagacacttggtataaaggaaatacatacaacgagaagatatgcgagttagcacaaataaccagaaacagatttaaaaatgcaaccaaaggagcactaccaaactaccccacaataatgtccacagacctatatgaataccactcaggcatacactccagcatatatctatcagctggcaggagctactttgaaaccaccggggcctactctgacattatatacaaccctttcacagacaaaggcacaggcaacataatctggatagactacctcacaaaagaagacaccatttttgtgaaaaacaaaagcaaatgcgagataatggacatgcccctgtgggcggcctgcacaggatacacagagttttgtgcaaagtatacaggcgactctgccattatctacaatgcaagaatactcataagatgcccatacactgagcccatgttaatagaccactcagacccaaacaaaagcttcgttccctactcatttaactttggcaacggaaagatgcccggaggcagctccaacgtgcccataagaatgagagccaagtggtacgtgaacatattccaccaaaaagaagtattagagagcatagtacagtccggaccgtttgggtacaagggcgacataagatcagctgtactagccatgaaatacagatttcactggaagtggggcggaaaccctatatccaaacaggtcgtcaggaatccctgctccaactccagctcctccgcggcccatagaggacctcgcagcgtacaagcggttgacccgaaatacaataccccagaggtcacgtggcactcgtgggacattagacgaggactctttggcaaagcaggtattaaaagaatgcaacaggaatcagatgctctttacattcctccaggaccaatcaagagacctcgcagggacaccaacgcccaagacccagaagagcaaaacgaaagctcaggtttcagagtccagcagcgactcccgtgggtccactccagccaagagacgcaaagctcccaagaagagacggaggcgcaggggtcggtacaagaccaactactcctccagctccgagagcagcgagttctccgactccagctccagcaactcgcaacccaagtcctcaaagtccaagcagggcacagcctacaccccctattatcttcccaagcataa

SEQ ID NO: 131 - DNA, 447 bp, Torque teno virus; identical to SEQ ID NO: 129
  source 1..447: mol_type = other DNA

SEQ ID NO: 132 - DNA, 2211 bp, Torque teno virus
  source 1..2211: mol_type = other DNA
atggcatggggcttctggggccgacgccgccggtggagacgatggagagcgcggcgcagacggtggagaccccgcagacgtaggagacgacgccctactcgccgctttcgagctcgtcgaagagtaaggaggcgcggggggaggtggcgcagacgctacagaaaatggcgacggggcagacgcagacggactcatagaaaaaagatagtcataaaacagtggcaaccaaactttataagacgctgctacatcatagggtacttaccacttatattctgcggcgaaaatacaaccgcccagaactttgccactcactcggacgacatgataagcaaaggaccgtacggggggggcatgactaccaccaaattcactctgagaatactgtacgacgagtttaccaggtttatgaacttttggactgtcagtaacggagacctagacctgtgtagatacgtgggctgcaaactaatattttttaaacaccccacggtggactttatagtacagataaacactcagcctcctttcttagacacgcacctcaccgcggccagcatacacccgggcatcatgatgctcagcaagagacacatactaataccctctctaaagacccggcccagcagaaaacacagggtggtcgtcagggtgggcgccccaagactttttcaggacaagtggtacccccagtcagacctgtgtgacacagttctgctttccatatttgcaaccgcctgcgacttgcaatatccgttcggctcaccactaactgacaacccttgcgtcaacttccagatcctggggccccagtacaaaaaacaccttagtattagctccactatggatcaaactaacgaaaaccattataaagaaaacttatttaacaaaactgaactatacaacacctttcaaaccatagctcagcttaaagagacaggacacatttcaggcattagtcctacttggaatgaagtccagaattcaacaacacttactaaagaaggtgacaatgccactcagagtagagacacttggtataaaggaaatacatacaacggtaagatatgccagttagcacaaataaccagaaacaggtttaaaaatgcaaccaaaggagcactaccaaactaccccacaataatgtccacagacctatatgaataccactcaggcatatactccagcatatgtctatcagctggcaggagctactttgaaaccaccggggcctactctgacattatatacaaccctttcacagacaaaggcacaggcaacataatctggatagactacctcacaaaagaagacaccatttttgtgaaaaacaaaagcaaatgcgagataatggacatgcccctgtgggcggcctgcacaggatacacagagttttgtgcaaagtatacaggcgactctgccattatctacaatgcaagaatactcataagatgcccatacactgagcccatgttaatagaccactcagacccaaacaaaggcttcgttccctactcatttaactttggcaacggaaagatgcccggaggcagctccaacgtgcccataagaatgagagccaagtggtacgtgaacatattccaccaaaaagaagtattagagagcatagtacagtccggaccgtttgggtacaagggcgacataaaatcagctgtactagccatgaaatacagatttcactggaagtggggcggaaaccctatatccaaacaggtcgtcaggaatccctgctccaactccagctcctccgcggcccatagaggacctcgcagcgtacaagcggttgacccgaaatacaataccccagaggtcacgtggcactcgtgggacattagacgaggactctttggcaaagcaggtattaaaagaatgcaacaggaatcagatgctctttacattcctccaggaccaatcaagagacctcgcagggacaccaacgcccaagacccagaagagcaaaacgaaagctcaggtttcagagtccagcagcgactcccgtgggtccactccagccaagagacgcaaagctcccaagaagagacggaggcgcaggggtcggtacaagaccaactactcctccagctccgagagcagcgagttctccgactccagctccagcaactcgcaacccaagtcctcaaagtccaagcagggcacagcctacaccccctattatcttcccaagcataa

SEQ ID NO: 133 - DNA, 447 bp, Torque teno virus
  source 1..447: mol_type = other DNA
atgcgttttcgcagggttgcccagaaaaggaaagtgcttttgcaaactgtgccagctgcaaagaaggctaggcggcttctaggtatgtggcagccccccacgcacaatgtcccgggcatcgagagaaactggtacgagagctgttttagatcccacgctgctgtttgtggctgtggcgattttgttggccatcttaatcatctggcaactactctgggtcgtcctccgcgtcctgggcccccaggcggaccccgcacgccgcaaataagaaacctgccagcgctcccggcgccccagggcgagcccggtgacagagcgccatggcatggggcttctggggccgacgccgccggtggagacgatggagagcgcggcgcagacggtggagatcccgcagacgtaggagacgacgccctactcgccgctttcgagctcgtcgaagagtaa

SEQ ID NO: 134 - DNA, 2211 bp, Torque teno virus
  source 1..2211: mol_type = other DNA
atggcatggggcttctggggccgacgccgccggtggagacgatggagagcgcggcgcagacggtggagatcccgcagacgtaggagacgacgccctactcgccgctttcgagctcgtcgaagagtaaggaggcgcggggggaggtggcgcagacgctacagaaaatggcgacggggcagacgcagacggactcatagaaaaaagatagtcataaaacagtggcaaccaaactttataagacgctgctacatcatagggtacttaccacttatattctgcggcgaaaatacaaccgcccagaactttgccactcactcggacgacatgataagcaaaggaccgtacggggggggcatgactaccaccaaattcactctgagaatactgtacgacgagtttaccaggtttatgaacttttggactgtcagtaacgaagacctagacctgtgtagatacgtgggctgcaaactaatattttttaaacaccccacggtggactttatagtacagataaacactcagcctcctttcttagacacgcacctcaccgcggccagcatacacccgggcatcatgatgctcagcaagagacacatactaataccctctctaaagacccggcccagcagaaagcacagggtggtcgtcagggtgggcgccccaagactttttcaggacaagtggtacccccagtcagacctgtgtgacacagttctgctttccatatttgcaaccgcctgcgacttgcaatatccgttcggctcaccactaactgacaacccttgcgtcaacttccagatcctggggccccagtacaaaaaacaccttagtattagctccactatggatcaaactaacgaaaaccattataaagaaaacttatttaacaaaactgaactatacaacacctttcaaaccatagctcagcttaaagagacaggacacatttcaggcattagtcctacttggaatgaagtccagaattcaacaacacttactaaaggaggtgacaatgccactcagagtagagacacttggtataaaggaaatacatacaacgagaacatatgcaagttagcagaggtaaccagaaacagatttaaaaatgcaaccaaaggagcactaccaaactaccccacaataatgtccacagacctatatgaataccactcaggcatatactccagcatatatctatcagcgggcaggagctactttgaaaccaccggggcctactctgacattatatacaaccctttcacagacaaaggcacaggcaacataatctggatagactacctcacaaaagaagacaccatttttgtgaaaaacaaaagcaaatgcgaaataatggacatgcccctgtgggcggcctgcacgggatacacagagttttgtgcaaagtatacaggcgactctgccattatctacaatgcaagaatactcataagatgcccatacactgagcccatgttaatagaccactcagacccaaacaaaggcttcgttccctactcatttaactttggcaacggaaagatgcccggaggcagctccaacgtgcccataagaatgagagccaagtggtacgtgaacatattccaccaaaaagaagtattagagagcatagtacagtccggaccgtttgggtacaagggcgacataaaatcagctgtactagccatgaaatacagatttcactggaagtggggcggaaaccctatatccaaacaggtcgtcaggaatccctgctccaactccagcccctccgcggcccatagaggacctcgcagcgtacaagcggttgacccgaaatacaataccccagaggtcacgtggcactcgtgggacattagacgaggactctttggcaaagcaggtattaaaagaatgcaacaggaatcagatgctctttacattcctccaggaccaatcaagagacctcgcagggacaccaacgcccaagacccagaagagcaaaacgaaagctcaggtttcagggtccagcagcgactcccgtgggtccactccagccaagagacgcaaagctcccaagaagagacggaggcgcaggggtcggtacaagaccaactactcctccagctccgagagcagcgagttctccgactccagctccagcaactcgcaacccaagtcctcaaagtccaagcagggcacagcctacaccccctattatcttcccaagcataa

SEQ ID NO: 135 - DNA, 420 bp, Torque teno virus
  source 1..420: mol_type = other DNA
atgcgttttcgcagggttgcccagaaaaggaaagtgcttttgcaaactgtgccagctgcaaagaaggctaggcggcttctaggtatgtggcagccccccacgcacaatgtcccgggcatcgagagaaactggtacgagagctgttttagatcccacgctgctgtttgtggctgtggcgattttgttggccatcttaatcatctggcaactactctgggtcgtcctccgcgtcctgggcccccaggcggaccccgcacgccgcaaataagaaacctgccagcgctcccggcgccccagggcgagcccggtgacagagcgtcatggcgtggggcttctggggccgacgccgccggtggagacgatggagagcgcggcgcagacggtggggaccccgcagacgtaggagacgacgccctcctc

SEQ ID NO: 136 - DNA, 2211 bp, Torque teno virus
  source 1..2211: mol_type = other DNA
atggcgtggggcttctggggccgacgccgccggtggagacgatggagagcgcggcgcagacggtggggaccccgcagacgtaggagacgacgccctcctcgccgctttcgagctcgtcgaagagtaaggaggcgcggggggaggtggcgcagacgctacagaaaatggcgacggggcagacgcagacggactcacagaaaaaagatagtcataaaacagtggcaaccaaactttataagacgctgctacatcatagggtacttaccacttatattctgcggcgaaaatacaaccgcccagaactttgccactcactcggacgacatgataagcaaaggaccgtacggggggggcatgactaccaccaaattcactctgagaatactgtacgacgagtttaccaggtttatgaacttttggactgtcagtaacgaagacctagacctgtgtagatacgtgggctgcaaactaatattttttaaacaccccacggtggactttatagtacagataaacactcagcctcctttcttagacacgcacctcaccgcggccagcatacacccgggcatcatgatgctcagcaagagacacatactaataccctctctaaagacccggcccagcagaaaacacagggtggtcgtcagggtgggcgccccaagactttttcaggacaagtggtacccccagtcagacctgtgtgacacagttctgctttccatattcgcaaccgcctgcgacttgcaatatccgttcggctcaccactaactgacaacccttgcgtcaacttccagatcctggggccccagtacaaaaaacaccttagtattagctccactatggatgacactaacaaagcacattatgaagaaaacttatttaataaaactgaactatacaacacctttcaaaccatagctcagcttagagacacaggacaaactgcaaacgctagtcctaattggaatgaggtccagaatacagcagcacttcagttatcaggtgcaaatgccactagcagcaaagacacttggtataaaggtaatacatacacgaaagacatatcaaagttagcagaaaaaaccagacaaagatttaaagctgcaacaatagcagcactaccaaactaccccacaataatgtccacagacctatatgaataccactcaggcatatactccagcatatatttatcagctggcaggagctactttgaaaccaccggggcctactctgacattatatacaaccctttcacagacaaaggcacaggcaacataatctggatagactacctcacaaaagaagacaccatttttgtaaaaaacaaaagcaaatgcgagataatggacatgcccctgtgggcggcctgcacaggatacacagagttttgtgcaaagtatacaggcgactctgccattatctacaatgcaagaatactcataagatgcccatacactgagcccatgttaatagaccactcagacccaaacaaaggcttcgttccctactcatttaactttggcaacggaaagatgcccggaggcagctccaacgtaccgataagaatgagagccaaatggtacgtgaacatattccaccaaaaggaggttctagaggctatagtacaaagcggaccgttcgggtacaagggcgacataaaatcagctgtactagccatgaaatacagatttcactggaagtggggcggaaaccctatatccaaacaggtcgtcaggaatccctgctccaactccagctcatccgcggcccatagaggacctcgcagcgtacaagcggttgacccgaaatacaatacctcagaggtcacgtggcactcgtgggacattagacgaggactctttgacaaagcaggtattaaaagaatgcaacaggaatcagatgctctttacattcctccaggaccaatcaagagacctcgcagggacaccaacgcccaagacccagaagagcaaaacgaaagctcaggtttcagagtccagcagcgactcccgtgggtccactccagccaagagacgcaaagcttccaagaagagacggaggcgcaggggtcggtacaagaccaactactcctccagctccgagagcagcgagttctccgactccagcaccagcaactcgcaacccaagtcctcaaagtccaagcagggcacagcctacaccccctattatcttcccaagcataa

SEQ ID NO: 137 - DNA, 453 bp, Torque teno virus
  source 1..453: mol_type = other DNA
atgcgtttttccaggattgctcgctcgaaaaggaaagtgccactgccaacactgccaataccaccgccgcctgggactatgagctggcgccctccggtccacaatgccgctggaatcgaccgtaactggttcgaatcctgtttcagatctcacgctagcagttgcggctgtggaaattttattggccatcttaatactctcgctactcgctacggctttactcctgggcccgcgccgccgcctggtggtccaggcccgcggccgccagtaccagtgaggccccggcacctggccggagacggtaaccagcccagggccctgccatggcgtggggatggtggagacgcagacgctggcccacctacagaaggtggcggcgctggagacgccgcaggagagtaccgcgacgaagacctcgaagagctgttcgccgctatggaaagagacgagtaa

SEQ ID NO: 138 - DNA, 2241 bp, Torque teno virus
  source 1..2241: mol_type = other DNA
atggtggagacgcagacgctggcccacctacagaaggtggcggcgctggagacgccgcaggagagtaccgcgacgaagacctcgaagagctgttcgccgctatggaaagagacgagtaaggaggcgccggtggggaggcggcggtaccgaaggggctacagacgcagggtcgcggtcagactgagacgcagacgcagacggggacgtaagagacttgtacttactcagtggcagccccagacccgtagaaagtgcaccatcaccgggtacctcccggtggtatggtgcggctacctccgggccgccaaaaactatgcctaccactctgacgactccacaaagcagccggacccctttgggggcgcgctgagcactacctcctttaaccttaaggtgctgtacgaccagcaccagagaggactcaacaggtggtctttccctaacgaccaactggacctagctcgctacagggggtgcacacttacgttctacagacagaaagccactgactttatagctatttatgacatctccgccccatacaaactagacaagtacagctctcccagctatcaccccggcaacatgataatgcagaaaaagaaaattctcattcccagctacgacactaaccccaggggccgccaaaaaatagtagttaaaatccccccccctaaactgttcgtggataagtggtatgcacaggaggacctgtgcgacgttaatcttgtgacacttgcggtcagcgcagcttcctttacacatccgttcggctcaccactaacgaacaacccttgtgtaaccttccaggtacttgactcaatatactattccgtaataggttacggttcctcagatcagaaaaaaaaacaagtacttgaaactctctataacgaaaatgcatactgggcctcacacttaactccttactttaccactggccttaaaattccatatccagatactaagaatcccagcactactgcatctgttactccaaacacgctatttacaacaggtagctacgactcaaacattaaaatagcaggagacagcaactacaactggtacccctacaaccttaaaaacaaaatagacaaacttcataaaattagagaacaatactttaaatgggaaacagatgaaggcccccaagccacatctgattatggcaaacaccacacttggactaaacccaccgatgactactacgaataccacctaggtttatttagtcccatattcataggacccaccagaagcaacaaactatttgcaaccgcctaccaggacgttacttacaaccccctaaacgacaaggcggtgggaaacaagttctggtttcagtacaacacaaaagcagacacccaggtggccaaacaaggctgctactgcatgctagaagacattcccctctgggccgccatgtatggctactctgactttatagagaccgagctaggccccttccaagacgcagagacggtgggctatatctgtgtaatatgcccctacaccgagccccccatgtacaacaaacacaatcccatgcagggttacgtgttttatgactcgttttttggcaatggcaagtggatagacggacggggacacatagagccttactggctctgccgctggaggccagaaatgcttttccagcagcaggttatgagagacattgtgcagaccgggccctggagctataaagacgaaagcaaaaactgtgttctgcccatgaagtataagttcagattcacatggggcggcaatatggtctcccaacagacaatcagaaacccctgcaagactgacggacaacttgccccctccggtagacagcctagagaagtacaagttgttgacccactcaccatgggtccccgctgggttttccactcctgggactggagacgtggctaccttagtgagacagctctcagacgcctgcgagaaaaaccactcgactatgaggcgtatatgcaaaaaccaaaaagacctagactgttccctgttacagagggcgacgaccagtccccgcagcaaggcgacgactggtgttcagaggaagaaaagtcgccgcagtttaccgaagagacgacgcagacgctacagctccagctccagcgccagctccggcgacagcagcgactcggagagcagctccaactcctacaacaccacctcctcaaaacgcaagcgggcctccaaataaacccattattattggtccggcagtaa

SEQ ID NO: 139 - DNA, 465 bp, Torque teno virus
  source 1..465: mol_type = other DNA
atgcacttttctcgaataagcagaaagaaagggaaagtgctactgctttgcgtgccagcagttaagaaaaaaccaactgctatgagcttctggagacctccgatgcacaatgtcacggggatccaacgcctgtggtacgagtcctttcaccgtggccatgctgctttttgtggttgtggggatcctgtacttcacattactgcacttgctgagacatatggccatccaacaggcccgagaccttctgggtcatcgggaatagatcccactccgcccatccgtagagccaggcctgccccggccgctccggaacccccacaggttgactccagaccggccctgccatggcatggagatggtggaagcgacggaggcgctggtggctccgcaagcggtggacccgtggcagacttcgcagacgatggcctagaccagctcgtcgccgccctagacgacgaagagtaa

SEQ ID NO: 140 - DNA, 2181 bp, Torque teno virus
  source 1..2181: mol_type = other DNA
atggcatggagatggtggaagcgacggaggcgctggtggctccgcaagcggtggacccgtggcagacttcgcagacgatggcctagaccagctcgtcgccgccctagacgacgaagagtaaggagacgcagacggtggaggagggggcgacccagacgcaggctgtaccgacgctacagacgcaaaaaacgtaggagacgaaagcccaaaataatcttaaaacaatggcagccagacattgtaaagaggtgctacatagtgggctacattcctgccataatatgtggggcgggcacctggtctcacaactacaccagccacctcctagacattatccccaaaggaccctttggaggagggcacagcactatgaggttctccctaaaagtactctttgaagaacacctcagacacttaaacttttggacaaaaagcaaccaggacctagaactcataagatactttagatgctcctttaaattctatagagaccaagacacagactacatagtacactacagcagaaaaactcccctgggaggaaacagactaacagcgcctagcctacaccccggtgtacagatgcttagcaaaaacaaaatattagtacctagctatgctacaaaacccaagggtgggagctatgtaaaagtaaccatagcaccccccacactactaactgacaagtggtactttagcaaagacatttgtgacacaaccttggttaacttagacgttgtactctgcaacttgcggtttccgttctgctcaccacaaactgacaacccttgcatcacattccaagttctgcattccttgtacaacgacttcctctccatagtagatactgaaaattacaaaaccacttttgttactacactgacaacaaaattaggtacaacatggggttcaagactaaatacatttagaacagaaggctgctactcacaccctaaactacctaaaaaacaactaattgctgcaaatgacacaacatactttacatcacctgatgggctctggggagacgcagttttcgacatctcaaaacctcaagtaattaccgaaaatatggagtcttacgctaactcagccaaacaaagaggggtgaacggagaccccgctttttgccacctaacaggaatatactcacctccctggctaacaccaggcagaatatcccctgaaaccccaggactttacacagacgtgacttacaacccatacgctgacaaaggagtaggcaacagaatatgggtcgactactgcagtaaaaaaggcaacaaatatgacaatacaagtaaatgccttttagaagacatgccactatggatggtatgctttggatacgtagactgggtaaaaaaagagactggcaactggggtattccactatgggctagagtacttatcagaagcccatacgctgttccaaaactgtataatgaagcagacccaaactatggatgggtacctatttcttactactttggagaaggcaaaatgccaaacggagacatgtacgtaccatttaaaataagaatgaaatggtacccttcaatgtggaaccaagagccagtgttaaatgacttagcaaagagcggaccgtttgcatacaaaaacacaaaaacaagcgtgactgtgactgccaaatataaatttacatttaacttcgggggcaaccccgtaccctcacagattgtacaagatccctgcacacagtccacctacgacatccccggcaccggtaacctgcctcgcagaacacaagtcattgacccgaaattcctcggtccccactattccttccaccggtgggacttcaggcgtggcctctttggctcacaagctattaagagagtgtcagaacaaccaacaacttctgagtttttattctcaggcccaaagagacccagaatcgatcaaggtccttacatcccgccagaaaaagactcaggttcactccaaagagaatcgagaccgtggagcagctcggagaccgaggcagagacagaagccccctcggaagaagagccggagaaccaagaagaacaagtactccagttgcagctcagacagcagcttcgagaacagcgaaaactcagacagggaatccagtgcctattcgagcaactgataacaacccaacagggggtccacaaaaacccattgttagagtag

SEQ ID NO: 141 - DNA, 465 bp, Torque teno virus
  source 1..465: mol_type = other DNA
atgcacttttctcgaataagcagaaagaaaaggaaagtgctactgctttgcgtgccagcagttaagaaaaaaccaactgctatgagcttctggagacctccgatgcacaatgtcacggggatccaacgcctgtggtacgagtcccttcaccgtggccatgctgctttttgtggttgtggggatcctgtacttcacattactgcacttgctgagacatatggccatccaacaggcccgagaccttctgggtcatcgggaatagatcccactccgcccatccgtagagccaggcctgccccggccgctccggaacccccacaggttgactccagaccggccctgccatggcatggagatggtgggagcgacggaggcgctggtggctccgcaagcggtggacccgtggcagacttcgcagacgatggcctagaccagctcgtcgccgccctagacgacgaagagtaa

SEQ ID NO: 142 - DNA, 2181 bp, Torque teno virus
  modified_base 1380: mod_base = OTHER; note = a, c, t, g, unknown or other
  source 1..2181: mol_type = other DNA
atggcatggagatggtgggagcgacggaggcgctggtggctccgcaagcggtggacccgtggcagacttcgcagacgatggcctagaccagctcgtcgccgccctagacgacgaagagtaaggagacgcagacggtggaggagggggcgacccagacgcagactgtaccgacgctacagacgcaaaaaacgtaggagacgaaagcccaaaataatcttaaaacaatggcagccagacattgtaaagaggtgctacatagtgggctacattcctgccataatatgtggggcgggcacctggtctcacaactacaccagccacctcctagacattatccccaaaggaccctttggaggagggcacagcactatgaggttctccctaaaagtactctttgaagaacacctcagacacttaaacttttggacaaaaagcaaccaggacctagaactcataagatactttagatgctcctttaaattctatagagaccaagacacagactacatagtacactacagcagaaaaactcccctgggaggaaacagactaacagcgcctagcctacaccccggtgtacagatgcttagcaaaaacaaaatattagtacctagctatgctacaaaacccaagggtgggagctatgtaaaagtaaccatagcaccccccacactactaactgacaagtggtactttagcaaagacatttgtgacacaaccttggttaacttagacgttgtactctgcaacttgcggtttccgttctgctcaccacaaactgacaacccttgcatcacattccaagttctgcattccttgtacaacgacttcctctctatagtagatactgaaaattacaaaaccacttttgttactacactgacaacaaaattaggtacaacatggggttcaagactaaatacatttagaacagaaggctgctactcacaccctaaactacctaaaaaacaactaattgctgcaaatgacacaacatactttacatcacctgatgggctctggggagacgcagttttcgacatctcaaaacctcaagtaattaccgaaaatatggagtcttacgctaactcagccaaacaaagaggggtgaacggagaccccgctttttgccacctaacaggaatatactcacctccctggctaacaccaggcagaatatcccctgaaaccccaggactttacacagacgtgacttacaacccatacgctgacaaaggagtaggcaacagaatatgggtcgactactgcagtaaaaaaggcaacaaatatgacaatacaagtaaatgccttttagaagacatgccactatggatggtatgctttggatacgtagactgggtaaaaaaagagactggcaantggggtattccactatgggctagagtacttatcagaagcccatacactgttccaaaactgtataatgaagcagacccaaactatggatgggtacctatttcttactactttggagaaggcaaaatgccaaacggagacatgtacgtaccatttaaaatgagaatgaaatggcacccttcaatgtggaaccaagagccagtgttaaatgacttagcaaagagcggaccgtttgcatacaaaaacacaaaaacaagcgtgactgtgactgccaaatataaatttacatttaacttcgggggcaaccccgtaccctcacagattgtacaaggtccctgcacacagtccacctacgacatccccggcaccggtaacctgcctcgcagaatacaggtcattgacccgaaattcctcggtccccactattccttccaccggtgggacttcaggcgtggcctctttggctcacaagctattaagagagtgtcagaacaaccaacaacttctgagtttttattctcaggcccaaagagacccagaatcgatcaaggtccttacatcccgccagaaaaagactcaggttcactccaaagagaatcgagaccgtggagcagctcggagaccgaggcagagacagaagccccctcggaagaagagccggagaaccaagaagaacaagtactccagttgcagctcagacagcagcttcgagaacagcgaaaactcagacagggaatccagtgcctattcgagcaactgataacaacccaacagggggtccacaaaaacccattgttagagtag

SEQ ID NO: 143 - DNA, 465 bp, Torque teno virus
  source 1..465: mol_type = other DNA
atgcacttttctcgaataagcagaaagaaaaggaaagtgctactgctttgcgtgccagcagttaagaaaaaaccaactgctatgagcttctggagacctccgatgcacaatgtcacggggatccaacgcctgtggtacgagtcccttcaccgtggccatgctgctttttgtggttgtggggatcctgtacttcacattaccgcacttgctgagacatatggccatccaacaggcccgagaccttctgggtcatcgggaatagatcccactccgcccatccgtagagccaggcctgccccggccgctccggaacccccacaggttgactccagaccggccctgccatggcatggagatggtggaagcgacggaggcgctggtggctccgcaagcggtggacccgtggcagacttcgcagacgatggcctagaccagctcgtcgccgccctagacgacgaagagtaa

SEQ ID NO: 144 - DNA, 2181 bp, Torque teno virus
  source 1..2181: mol_type = other DNA
atggcatggagatggtggaagcgacggaggcgctggtggctccgcaagcggtggacccgtggcagacttcgcagacgatggcctagaccagctcgtcgccgccctagacgacgaagagtaaggagacgcagacggtggaggagggggcgacccagacgcagactgtaccgacgctacagacgcaaaaaacgtaggagacgaaagcccaaaataatcttaaaacaatggcagccagacattgtaaagaggtgctacatagtgggctacattcctgccataatatgtggggcgggcacctggtctcacaactacaccagccacctcctagacattatccccaaaggactctttggaggagggcacagcactatgaggttctccctaaaagtactctttgaagaacacctcagacacttaaacttttggacaaaaagcaaccaggacctagaactcataagatactttagatgctcctttaaattctatagagaccaagacacagactacatagtacactacagcagaaaaactcccctgggaggaaacagactaacagcgcctagcctacaccccggtgtacagttgcttagcaaaaacaaaatattagtacctagctatgctacaaaacccaagggtgggagctatgtaaaagtaaccatagcaccccccacactactaactgacaagtggtactttagcaaagacatttgtgacacaaccttggttaacttagacgttgtactctgcaacttgcggtttccgttctgctcaccacaaactgacaacccttgcatcacattccaagttctgcattccttgtacaacgacttcctctctatagtagatactgaaaattacaaaaccacttttgttactacactgacaacaaaattaggtacaacatggggttcaagactaaatacatttagaacagaaggctgctactcacaccctaaactacctaaaaaacaactaattgctgcaaatgacacaacatactttacatcacctgatgggctctggggagacgcagttttcaacatctcaaaacctcaagtaattaccgaaaatatggagtcttacgctaactcagccaaacaaagaggggtgaacggagaccccgctttttgccacctaacaggaatatactcacctccctggctaacaccaggcagaatatcccctgaaaccccaggactttacacagacgtgacttacaacccatacgctgacaaaggagtaggcaacagaatatgggtcgactactgcagtaaaaaaggcaacaaatatgacaatacaagtaaatgccttttagaagacatgccactatggatggtatgctttggatacgtagactgggtaaaaaaagagactggcaactggggtattccactatgggctagagtacttatcagaagcccatacactgttccaaaactgtataatgaagcagacccaaactatggatgggtacctatttcttactactttggagaaggcaaaatgccaaacggagacatgtacgtaccatttaaaataagaatgaaatggcacccttcaatgtggaaccaagagccagtgttaaatgacttagcaaagagcggaccgtttgcatacaaaaacacaaaaacaagcgtgactgtgactgccaaatataaatttacatttaacttcgggggcaaccccgtaccctcacagattgtacaagatccctgcacacagtccacctacgacatccccggcaccggtaacctgcctcgcagaatacaagtcattgacccgaaattcctcggtccccactattccttccaccggtgggacttcaggcgtggcctctttggctcacaagctattaagagagtgtcagaacaaccaacaacttctgagtttttattctcaggcccaaagagacccagaatcgatcaaggtccttacatcccgccagaaaaagactcaggttcactccaaagagaatcgagaccgtggagcagctcggagaccgaggcagagacagaagccccctcggaagaagagccggagaaccaagaagaacaagtactccagttgcagctcagacagcagcttcgagaacagcgaaaactcagacagggaatccagtgcctattcgagcaactgataacaacccaacagggggtccacaaaaacccattgttagagtag

SEQ ID NO: 145 - DNA, 465 bp, Torque teno virus
  source 1..465: mol_type = other DNA
atgcacttttctcgaataagcagaaagaaaaggaaagtgctactgctttgcgtgccagcagctaagaaaaaaccaactgctatgagcttctggaaacctccggtacacaatgtcacggggatccaacgcatgtggtatgagtcctttcaccgtggccacgcttctttttgtggttgtgggaatcctatacttcacattactgcacttgctgaaacatatggccatccaacaggcccgagaccttctgggccaccgggagtagaccccaacccccacatccgtagagccaggcctgccccggccgctccggggccctcacaggttgattcgagaccagccctgacatggcatggggatggtggaagcgacggaggcgctggtggttccggaagcggtggacccgtggcagacttcgcagacgatggcctcgatcagctcgtcgccgccctagacgacgaagagtaa

SEQ ID NO: 146 - DNA, 426 bp, Torque teno virus
  source 1..426: mol_type = other DNA
atggcatggggatggtggaagcgacggaggcgctggtggttccggaagcggtggacccgtggcagacttcgcagacgatggcctcgatcagctcgtcgccgccctagacgacgaagagtaaggaggcgcagacggtggaggagggggagacgaaaaacagggacttacagacgcaggagacgctttagacgcaggagacgaaaagcaaaacttataataaaactgtggcaacctgcagtaattaaaagatgcagaataaagggatacataccactgattataagtgggaacggtacctttgccacaaactttaccagtcacataaatgacagaataatgaaaggccccttcgggggaggacacagcactatgaggttcagcctctacattttgtttgaggagcacctcagacacatgaacttctag

SEQ ID NO: 147 - DNA, 1500 bp, Torque teno virus
  source 1..1500: mol_type = other DNA
atggcagttgaggctgacttgcggtttccgttctgctcaccacaaactgacaacacttgcatcagcttccaggtccttagttccgtttacaacaactacctcagtattaatacctttaataatgacaactcagactcaaagttaaaagaatttttaaataaagcatttccgacaacaggcacaaaaggaacaagtttaaatgcactaaatacatttagaacagaaggatgcataagtcacccacaactaaaaaaaccaaacccacaaataaacaaaccattagagtcacaatactttgcacctttagatgccctctggggagaccccatatactataatgatctaaatgaaaacaaaagtttgaacgatatcattgagaaaatactaataaaaaacatgattacataccatgcaaaactaagagaatttccaaattcataccaaggaaacaaggccttttgccacctaacaggcatatacagcccaccatacctaaaccaaggcagaatatctccagaaatatttggactgtacacagaaataatttacaacccttacacagacaaaggaactggaaacaaagtatggatggacccactaactaaagagaacaacatatataaagaaggacagagcaaatgcctactgactgacatgcccctatggactttactttttggatatacagactggtgtaaaaaggacactaataactgggacttaccactaaactacagactagtactaatatgcccttatacctttccaaaattgtacaatgaaaaggtaaaagactatgggtacatcccgtactcctacaaattcggagcgggtcagatgccagacggcagcaactacataccctttcagtttagagcaaagtggtaccccacagtactacaccagcaacaggtaatggaggacataagcaggagcgggccctttgcacctaaggtagaaaaaccaagcactcagctggtaatgaagtactgttttaactttaactggggcggtaaccctatcattgaacagattgttaaagaccccagcttccagcccacctatgaaatacccggtaccggtaacatccctagaagaatacaagtcatcgacccgcgggtcctgggaccgcactactcgttccggtcatgggacatgcgcagacacacatttagcagagcaagtattaagagagtgtcagaacaacaagaaacttctgaccttgtattctcaggcccaaaaaagcctcgggtcgacatcccaaaacaagaaacccaagaagaaagctcacattcactccaaagagaatcgagaccgtgggagaccgaggaagaaagcgagacagaagccctctcgcaagagagccaagaggtccccttccaacagcagttgcagcagcagtaccaagagcagctcaagctcagacagggaatcaaagtcctcttcgagcagctcataaggacccaacaaggggtccatgtaaacccatgcctacagtag

SEQ ID NO: 148 - DNA, 465 bp, Torque teno virus
  source 1..465: mol_type = other DNA
atgcacttttctcgaataagcagaaagaaaaggaaagtgctactgctttgcgtgccagcagctaagaaaaaaccaactgctatgagcttctggaaacctccggtacacaatgtcacggggatccaacgcatgtggtatgagtcctttcaccgtggccacgcttctttttgtggttgtgggaatcctatacttcacattactgcacttgctgaaacatatggccatccaacaggcccgagaccttctgggccaccgggagtagaccccaacccccacatccgtagagccaggcctgccccggccgctccggagccctcacaggttgattcgagaccagccctgacatggcatggggatggtggaagcgacggaggcgctggtggttccggaagcggtggacccgtggcagacttcgcagacgatggcctcgatcagctcgtcgccgccctagacgacgaagagtaa

SEQ ID NO: 149 - DNA, 2232 bp, Torque teno virus
  source 1..2232: mol_type = other DNA
atggcatggggatggtggaagcgacggaggcgctggtggttccggaagcggtggacccgtggcagacttcgcagacgatggcctcgatcagctcgtcgccgccctagacgacgaagagtaaggaggcgcagacggtggaggagggggagacgaaaaacaaggacttacagacgcaggagacgctttagacgcaggggacgaaaagcaaaacttataataaaactgtggcaacctgcagtaattaaaagatgcagaataaagggatacataccactgattataagtgggaacggtacctttgccacaaactttaccagtcacataaatgacagaataatgaaaggccccttcgggggaggacacagcactatgaggttcagcctctacattttgtttgaggagcacctcagacacatgaacttctggaccagaagcaacgataacctagagctaaccagatacttgggggcttcagtaaaaatatacaggcacccagaccaagactttatagtaatatacaacagaagaacccctctaggaggcaacatctacacagcaccctctctacacccaggcaatgccattttagcaaaacacaaaatattagtaccaagtttacagacaagaccaaagggtagaaaagcaattagactaagaatagcaccccccacactctttacagacaagtggtactttcaaaaggacatagccgacctcacccttttcaacatcatggcagttgaggctgacttgcggtttccgttctgctcaccacaaactgacaacacttgcatcagcttccaggtccttagttccgtttacaacaactacctcagtattaatacctttaataatgacaactcagactcaaagttaaaagaatttttaaataaagcatttccaacaacaggcacaaaaggaacaagtttaaatgcactaaatacatttagaacagaaggatgcataagtcacccacaactaaaaaaaccaaacccacaaataaacaaaccattagagtcacaatactttgcacctttagatgccctctggggagaccccatatactataatgatctaaatgaaaacaaaagtttgaacgatatcattgagaaaatactaataaaaaacatgattacataccatgcaaaactaagagaatttccaaattcataccaaggaaacaaggccttttgccacctaacaggcatatacagcccaccatacctaaaccaaggcagaatatctccagaaatatttggactgtacacagaaataatttacaacccttacacagacaaaggaactggaaacaaagtatggatggacccactaactaaagagaacaacatatataaagaaggacagagcaaatgcctactgactgacatgcccctatggactttactttttggatatacagactggtgtaaaaaggacactaataactgggacttaccactaaactacagactagtactaatatgcccttatacctttccaaaattgtacaatgaaaaagtaaaagactatgggtacatcccgtactcctacaaattcggagcgggtcagatgccagacggcagcaactacataccctttcagtttagagcaaagtggtaccccacagtactacaccagcaacaggtaatggaggacataagcaggagcgggccctttgcacctaaggtagaaaaaccaagcactcagctggtaatgaagtactgttttaactttaactggggcggtaaccctatcattgaacagattgttaaagaccccagcttccagcccacctatgaaatacccggtaccggtaacatccctagaagaatacaagtcatcgacccgcgggtcctgggaccgcactactcgttccggtcatgggacatgcgcagacacacatttagcagagcaagtattaagagagtgtcagaacaacaagaaacttctgaccttgtattctcaggcccaaaaaagcctcgggtcgacatcccaaaacaagaaacccaagaagaaagctcacattcactccaaagagaatcgagaccgtgggagaccgaggaagaaagcgagacagaagccctctcgcaagagagccaagaggtccccttccaacagcagttgcagcagcagtaccaagagcagctcaagctcagacagggaatcaaagtcctcttcgagcagctcataaggacccaacaaggggtccatgtaaacccatgcctacggtag

SEQ ID NO: 150 - DNA, 465 bp, Torque teno virus
  source 1..465: mol_type = other DNA
atgcacttttctcgaataagcagaaagaaaaggaaagtgctactgctttgcgtgccagcagctaagaaaaaaccaactgctatgagcttctggaaacctccggtacacaatgtcacggggatccaacgcatgtggtatgagtcctttcaccgtggccacgcttctttttgtggttgtgggaatcctatacttcacattactgcacttgctgaaacatatggccatccaacaggcccgagaccttctgggccaccgggagtagaccccaacccccacatccgtagagccaggcctgccccggccgctccggagccctcacaggttgattcgagaccagccctgacgtggcatggggatggtggaagcgacggaggcgctggtggttccggaagcggtggacccgtggcagacttcgcagacgatggcctcgatcagctcgtcgccgccctagacgacgaagagtaa

SEQ ID NO: 151 - DNA, 1896 bp, Torque teno virus
  source 1..1896: mol_type = other DNA
atgaaaggccccttcgggggaggacacagcactatgaggttcagcctctacattttgtttgaggagcgcctcagacacatgaacttctggaccagaagcaacgataacctagagctaaccagatacttgggggcttcagtaaaaatatacaggcacccagaccaagactttatagtaatatacaacagaagaacccctctaggaggcaacatctacacagcaccctctctacacccaggcaatgccattttagcaaaacacaaaatattagtaccaagtttacagacaagaccaaagggtagaaaagcaattagactaagaatagcaccccccacactctttacagacaagtggtactttcaaaaggacatagccgacctcacccttttcaacatcatggcagttgaggctgacttgcggtttccgttctgctcaccacaaactggcaacacttgcatcagcttccaggtccttaattccgtttacaacaactacctcagtattaatacctttaataatgacaactcagactcaaagttaaaagaatttttaaataaagcatttccaacaacaggcacaaaaggaacaagtttaaatgcactaaatacatttagaacagaaggatgcataagtcacccacaactaaaaaaaccaaacccacaaataaacaaaccattagattcacaatactttgcacctttagacgccctctggggagaccccatatactataatgatctaaatgaaaagaaaagtttgaaggatatcattgagaacatactaataaaaaacatgattacataccatgaaaaactaagagagtttccaaattcataccaaggaaacaaggccttttgccacctaacaggcatatacagcccaccatacctaaaccaaggcagaatatctccagaaatatttggactgtacacagaaataatttacaacccttacacagacaaaggaactggaaacaaagtatggatggacccactaactaaagagaacaacatatataaagaaggacagagcaaatgcctactgactgacatgcccctatggactttactttttggatatacagactggtgtaaaaaggacactaataactgggacttaccactaaactacagactagtactaatatgcccttatacctttccaaaattgtacaatgaaaaggtaaaagactatgggtacatcccgtactcctacaaattcggagcgggtcagatgccagacggcagcaactacataccctttcagtttagagcaaagtggtaccccacagtactacaccagcaacaggtaatggaggacataagcaggagcgggccctttgcacctaaggtagaaaaaccaggcactcagctggtaatgaagtactgttttaactttaactggggcggtaaccctatcattgaacagattgttaaagaccccagcttccagcccacctatgaaatacccggtaccggtgacatccctagaagaatacaagtcatcgacccgcgggtcctgggaccgcactactcgttccggtcatgggacacgcgcagacacacatttagcagagcaagtattaagagagtgtcagaacaacaagaagcttctgaccttgtattctcaggcccaaaaaagcctcgggtcgacatcccaaaacaagaaacccaagaagaaagctcacattcactccaaagagaatcgagaccgtgggagaccgaggaagaaagcgagacagaagccctctcgcaagagagccaagaggtccccttccaacagcagttgcagcagcagtaccaagagcagctcaagctcagacagggaatcaaagtcctcttcgagcagctcataaggacccaacaaggggtccatgtaaacccatgcctacagtag

SEQ ID NO: 152 - DNA, 465 bp, Torque teno virus
  source 1..465: mol_type = other DNA
atgcacttttctcgaataagcagaaagaaaaggaaagtgctactgctttgcgtgccagcagctaagaaaaaaccaactgctatgagcttctggaaacctccggtacacaatgtcacggggatccaacgcatgtggtatgagtcctttcaccgtggccacgcttctttttgtggttgtgggaatcctatacttcacattactgcacttgctgaaacatatggccgtccaacaggcccgagaccttctgggccaccgggagtagaccccaacccccacatccgtagagccaggcctgccccggccgctccggagccctcacaggttgattcgagaccagccctgacatggcatggggatggtggaagcgacggaggcgctggtggttccggaagcggtggacccgtggcagacttcgcagacgatggcctcgatcagctcgtcgccgccctagacgacgaagagtaa

SEQ ID NO: 153 - DNA, 2232 bp, Torque teno virus
  source 1..2232: mol_type = other DNA
atggcatggggatggtggaagcgacggaggcgctggtggttccggaagcggtggacccgtggcagacttcgcagacgatggcctcgatcagctcgtcgccgccctagacgacgaagagtaagggggcgcagacggtggaggagggggagacgaaaaacaaggacttacagacgcaggagacgctttagacgcaggagacgaaaagcaaaacttatagtaaaactgtggcaacctgcagtaattaaaagatgcagaataaagggatacataccactgattataggtgggaacggtacctttgccacaaactttaccagtcacataaatgacagaataatgaaaggccccttcgggggaggacacagcactatgaggttcagcctctacattttgtttgaggagcacctcagacacatgaacttctggaccagaagcaacgataacctagagctaaccagatacttgggggcttcagtaaaaatatacaggcacccagaccaagactttatagtaatatacaacagaagaacccctctaggaggcaacatctacacagcaccctctctacacccaggcaatgccattttagcaaaacacaaaatattagtaccaagtttacagacaagaccaaagggtagaaaagcaattagactaagaatagcaccccccacactctttacagacaagtggtactttcaaaaggacatagccgacctcacccttttcaacatcatggcagttgaggctgacttgcggtttccgttctgctcaccacaaactgacaacacttgcatcagcttccaggtccttagttccgtttacaacaactacctcagtattaatacctttaataatgacaactcagactcaaagttaaaagaatttttaaataaagcatttccaacaacaggcacaaaaggaacaagtttaaatgcactaaatacatttagaacagaaggatgcataagtcacccacaactaaaaaaaccaaacccacaaataaacaaaccattagagtcacaatactttgcacctttagatgccctctggggagaccccatatactataatgatctaaatgaaaacaaaagtttgaacgatatcattgagaaaatactaataaaaaacatgattacataccatgcaaaactaagagaatttccaaattcataccaaggaaacaaggccttttgccacctaacaggcatatacagcccaccatacctaaaccaaggcagaatatctccagaaatatttggactgtacacagaaataatttacaacccttacacagacaaaggaactggaaacaaagtatggatggacccactaactaaagagaacaacatatataaagaaggacagagcaaatgcctactgactgacatgcccctatggactttactttttggatatacagactggtgtaaaaaggacactaataactgggacttaccactaaactacagactagtactaatatgcccttatacctttccaaaattgtacaatgaaaaggtaaaagactatgggtacatcccgtactcctacaaattcggagcgggtcagatgccagacggcagcaactacataccctttcagtttagagcaaagtggtaccccacagtactacaccagcaacaggtaatggaggacataagcaggagcgggccctttgtacctaaggtagaaaaaccaagcactcagctggtaatgaagtactgttttaactttaactggggcggtaaccctatcattgaacagattgttaaagaccccagcttccagcccacctatgaaatacccggtaccggtaacatccctagaagaatacaagtcatcgacccgcgggtcctgggaccgcactactcgttccggccatgggacatgcgcagacacacatttagcagagcaagtattaagagagtgtcagaacaacaagaaacttctgaccttgtattctcaggcccaaaaaagcctcgggtcgacatcccaaaacaagaaacccaagaagaaagctcacattcactccaaagagaatcgagaccgtgggagaccgaggaagaaagcgagacagaagccctctcgcaagagagccaagaggtccccttccaacagcagttgcagcagcagtaccaagaacagctcaagctcagacagggaatcaaagtcctcttcgagcagctcataaggacccaacaaggggtccatgtaaacccatgcctacagtag

SEQ ID NO: 154 - DNA, 465 bp, Torque teno virus
  source 1..465: mol_type = other DNA
atgcacttttctcgaataagcagaaagaaaaggaaagtgctactgctttgcgtgccagcagctaagaaaaaaccaactgctatgagcttctggaaacctccggtacacaatgtcacggggatccaacgcatgtggtatgggtcctttcaccgtggccacgcttctttttgtggttgtgggaatcctatacttcacattactgcacttgctgaaacatatggccatccaacaggcccgagaccttctgggccaccgggagtagaccccaacccccacatccgtagagccaggcctgccccggccgctccggagccctcacaggttgattcgagaccagccctgacatggcatggggatggtggaagcgacggaggcgctggtggtcccggaagcggtggacccgtggcagacttcgcagacgatggcctcgatcagctcgtcgccgccctagacgacgaagagtaa

SEQ ID NO: 155 - DNA, 228 bp, Torque teno virus
  source 1..228: mol_type = other DNA
atggcatggggatggtggaagcgacggaggcgctggtggtcccggaagcggtggacccgtggcagacttcgcagacgatggcctcgatcagctcgtcgccgccctagacgacgaagagtaaggaggcgcagacggtggaggagggggagacgaaaaacaaggacttacagacgcaggagacgctttagacgcaggagacgaaaagcaaaacttataataaaactgtga

SEQ ID NO: 156 - DNA, 354 bp, Torque teno virus
  source 1..354: mol_type = other DNA
atgaaaggccccttcgggggaggacacagcactatgaggttcagcctctacattttgtttgaggagcacctcagacacatgaacttctggaccagaagcaacgataacctagagctaaccagatacttgggggcttcagtaaaaatatacaggcacccagaccaagactttatagtaatatacaacagaagaacccctctaggaggcaacatctacacagcaccctctctacacccaggcaatgccattttagcaaaacacaaaatattagtaccaagtttacagacaagaccaaagggtagaaaagcaattagactaagaatagcaccccccacactctttacagacaagtag

SEQ ID NO: 157 - DNA, 1500 bp, Torque teno virus
  source 1..1500: mol_type = other DNA
atggcagttgaggctgacttgcggtttccgttctgctcaccacaaactgacaacacttgcatcagcttccaggtccttagttccgtttacaacaactacctcagtattaatacctttaataatgacaactcagactcaaagttaaaagaatttttaaataaagcatttccaacaacaggcacaaaaggaacaagtttaaatgcactaaatacatttagaacagaaggatgcataagtcacccacaactaaaaaaaccaaacccacaaacaaacaaaccatcagagtcacaatactttgcacctttagatgccctctggggagaccccatatactataatgatctaaatgaaaagaaaagtttcaagaatatcattgagaacatactaataaaaaacatgattacataccatgaaaaactaacagaatttccaaattcataccaaggaaacaaggccttttgccacctaacaggcatatacagcccaccatacctaaaccaaggcagaatatctccagaaatatttggactgtacacagaaataatttacaacccttacacagacaaaggaactggaaacaaagtatggatggacccactaactaaagagaacaacatatataaagaaggacagagcaaatgcctactgactgacatgcccctatggactttactttttggatatacagactggtgtaaaaaggacactaataactgggacttaccactaaactacagactagtactaatatgcccttatacctttccaaaattgtacaatgaaaaggtaaaagactatgggtacatcccgtactcctacaaattcggagcgggtcagatgccagacggcagcaactacataccctttcagtttagagcaaagtggtaccccacagtactacaccagcaacaggtaatggaggacataagcaggagcgggccctttgcacctaaggtagaaaaaccaagcactcagctggtaatgaagtactgttttaactttaactggggcggtaaccctatcattgaacagattgttaaagaccccagcttccagcccacctatgaaatacccggtaccggtaacatccctagaagaatacaagtcatcgacccgcgggtcctgggaccgcactactcgttccggtcatgggacatgcgcagacacacatttagcagagcaagtattaagagagtgtcagaacaacaagaaacttctgaccttgtattctcaggcccaaaaaagcctcgggtcgacatcccaaaacaagaaacccaagaagaaagctcacattcactccaaagagaatcgagaccgtgggagaccgaggaagaaagcgagacagaagccctctcgcaagagagccaagaggtccccttccaacagcagttgcagcagcagtaccaagagcagctcaagctcagacagggaatcaaagtcctcttcgagcagctcataaggacccaacaaggggtccatgtaaacccatgcctacagtag

SEQ ID NO: 158 - DNA, 465 bp, Torque teno virus
  source 1..465: mol_type = other DNA
atgcacttttctcgaataagcagaaagaaaaggaaagtgctactgctttgcgtgccagcagctaagaaaaaaccaactgctatgagcttctggaaacctccggtacacaatgtcacggggatccaacgcatgtggtatgagtcctttcaccgtggccacgcttctttttgtgattgtgggaatcctatacttcacattactgcacttgctgaaacatatggccatccaacaggcccgagaccttctgggccaccgggagtagaccccaacccccacatccgtagagccaggcctgccccggccgctccggagccctcacaggttgattcgagaccagccctgacatggcatggggatggtggaagcgacagaggcgctggtggttccggaagcggtggacccgtggcagacttcgcagacgatggcctcgatcagctcgttgccgccctagacgacgaagagtaa

SEQ ID NO: 159 - DNA, 2232 bp, Torque teno virus
  source 1..2232: mol_type = other DNA
atggcatggggatggtggaagcgacagaggcgctggtggttccggaagcggtggacccgtggcagacttcgcagacgatggcctcgatcagctcgttgccgccctagacgacgaagagtaaggaggcgcagacggtggaggagggggagacgaaaaacaaggacttacagacgcaggagacgctttagacgcaggagacgaaaagcaaaacttataataaaactgtggcaacctgcagtaattaaaagatgcagaataaagggatacataccactgattataagtgggaacggtacctttgccacaaactttaccagtcacataaatgacagaataatgaagggccccttcgggggaggacacagcactatgaggttcagtctctacattttgtttgaggagcacctcagacacatgaacttctggaccagaagcaacgataacctagagctaaccagatacttgggggcttcagtaaaaatatacaggcacccagaccaagactttatagtaatatacaacagaagaacccctctaggaggcaacatctacacagcaccctctctacacccaggcaatgccattttagcaaaacacaaaatattagtaccaagtttacagacaagaccaaagggtagaaaagcaattagactaagaatagcaccccccacactctttacagacaagtggtactttcaaaaggacatagccgacctcacccttttcaacatcatggcagttgaggctgacttgcggtttccgttctgctcaccacaaactgacaacacttgcatcagcttccaggtccttagttccgtttacaacaactacctcagtattaatacctttaataatgacaactcagactcaaagttaaaagaatttttaaataaagcatttccaacaacaggcacaaaaggaacaagtttaaatgcactaaatacatttagaacagaaggatgcataagtcacccacaactaaaaaaaccaaacccacaaataaacaaaccattagagtcacaatactttgcacctttagatgccctctggggagaccccatatactataatgatctaaatgaaaacaaaagtttgaacgatatcattgagaaaatactaataaaaaacatgattacataccatgcaaaactaagagaatttccaaattcataccaaggaaacaaggccttttgccacctaacaggcatatacagcccaccatacctaaaccaaggcagaatatctccagaaatatttggactgtacacagaaataatttacaacccttacacagacaaaggaactggaaacaaagtatggatggacccactaactaaagagaacaacatatataaagaaggacagagcaaatgcctactgactgacatgcccctatggactttactttttggatatacagactggtgtaaaaaggacactaataactgggacttaccactaaactacagactagtactaatatgcccttatacctttccaaaattgtacaatgaaaaggtaaaagactatgggtacatcccgtactcctacaaattcggagcgggtcagatgccagacggcagcaactacataccctttcagtttagagcaaagtggtaccccacagtactacaccagcaacaggtaatggaggacataagcaggagcgggccctttgcacctaaggtagaaaaaccaagcactcagctggtaatgaagtactgttttaactttaactggggcggtaaccctatcattgaacagattgttaaagaccccagcttccagcccacctatgaaatacccggtaccggtaacatccctagaagaatacaagtcatcgacccgcgggtcctgggaccgcactactcgttccggtcatgggacatgcgcagacacacatttagcagagcaagtattaagagagtgtcagaacaacaagaaacttctgaccttgtattctcaggcccaaaaaagcctcgggtcgacatcccaaaacaagaaacccaagaagaaagctcacattcactccaaagagaatcgagaccgtgggagaccgaggaagaaagcgagacagaagccctctcgcaagagagccaagaggtccccttccaacagcagttgcagcagcagtaccaagagcagctcaagctcagacagggaatcaaagtcctcttcgagcagctcataaggacccaacaaggggtccatgtaaacccatgcctacagtag

SEQ ID NO: 160 - DNA, 2313 bp, Torque teno virus
  source 1..2313: mol_type = other DNA
atggcctatggctggtggcgccgaaggagaagacggtggcgcaggtggagacccagaccatggaggccccgctggaggacccgaagacgcagacctgctagacgccgtggccaccgcagaaacgtaagaagacgccgcagaggagggaggtggaggaggagatataggagatggaaaagaaagggcaggcgcagaaaaaaagctaaaataataataagacaatggcaaccaaactacagaaggagatgtaacatagtaggctacatccctgtactaatatgtggcgaaaatactgtcagcagaaactatgccacacactcagacgataccaactacccaggaccctttggggggggtatgactacagacaaatttactttaagaattctgtatgacgagtacaaaaggtttatgaactactggacagcatctaacgaagacctagacctttgtagatatctaggagtaaacctgtactttttcagacacccagatgtagattttatcataaaaattaataccatgcctccttttctagacacagaactcacagcccctagactacacccaggcatgctagccctagacaaaagagcaagatggatacctagcttaaaatctataccaggaaaaaaacactatattaaaataagagtaggggcaccaaaaatgttcactgataaatggtacccccaaacagatctttgtgacatggtgcttctaactgtctatgcaaccgcagcggatataccatatccgttcggctcaccactaactgactctgtggttgtgaacttccaggttctgcaatccatgtatgataaatacattagcatattaccagaccaaaagtcacaaagtaagtcactacttagtaacatagcaaattacattcccttttataataccacacaaactatagcccaattaaagccatttatagatgcaggcaatataacatcaggcacagcagcaacaacatggggatcatacataaacacaaccaaatttactacaacagccacaacaacttatacatatccaggcactacaactaacacagttactatgtattcctctaatgactcctggtacagaggaacagtatataacaatcaaattaaagagttaccaaaaaaagcagctgaattatactcaaaagcaacaaaaaccttgctaggaaacaccttcacaactgaagactgcacactagaataccatggaggactatacagctcaatatggctatcccctggtagatcttactttgaaacaccaggagcatacacagacataaagtacaatccattcacagacagaggagaaggcaacatgttatggatagactggctaagcaaaaaaaacatgaactatgacaaagtacaaagtaaatgcttagtatcagacctacctctatgggcatcagcatatggatatgtagaattttgtgcaaaaagtacaggagaccagaacatacacatgaatgccaggctactaataagaagtccctttacagacccacagctactagtacacacagaccccacaaaaggctttgttccctactctttaaactttggaaatggtaaaatgccaggaggtagtagtaatgtgcctattagaatgagagctaaatggtatccaacattgtttcaccaacaagaagtactagaggccttagcacagtcaggcccctttgcataccactcagacattaaagaagtatctctgggtatgaaataccgttttaagtggatctggggtggaaaccccgttcgccaacaggttgttagaaatccctgcaaagaaacccactcctcgggcaatagagtccctagaagcttacaaatcgttgacccgaaatacaactcaccggaactcacattccatacctgggacttcagacgtggcctctttggcccgaaagctattcagagaatgcaacaacaaccaacaactactgacattttttcagcaggccgcaagagacccaggagggacaccgaggtgtaccactccagccaagaaggggagcaaaaagaaagcttacttttccccccagtcaagctcctcagacgagtccccccgtgggaagactcgcagcaggaggaaagcgggtcgcaaagctcagaggaagagacgcagaccgtctcccagcagctcaagcagcagctgcagcaacagcaaatcctgggagtcaaactcagactcctgttcgaccaagtccaaaaaatccaacaaaatcaagatatcaaccctaccttgttaccaagggggggggatctagcatcgttatttcaaatagcaccataa

SEQ ID NO: 161 - DNA, 2313 bp, Torque teno virus
  source 1..2313: mol_type = other DNA
atggcctatgggttgtggaggagacggcgaaggaggtggaagaggtggagacgcagacggtggagacgccgctggaggacccgccgacgcagacctgctggacgccgtagacgccgcagaacagtaaggagacggcgcaggcgcgggaggtggaggaggagatataggagatggaggcgaaaaggcagacgcaggaaaaagaaaaaactcataataagacaatggcagccaaactataccagaaagtgcaacattgtgggttatatgccagttataatgtgtggcgaaaatactgtcagcagaaactatgccacacactcagacgataccaactacccaggaccctttggggggggtatgactacagacaaatttactttaagaattctgtatgactggtacaaaaggtttatgaactactggacagcatctaacgaagacctagacctttgtagatatctaggagtgaacctgtactttttcagacacccagatgtagattttatcataaaaattaataccatgcctccttttctagacacagaactcacagcccctagcatacacccaggcatgctagccctagacgaaagagcaagatggatacctagcttaaaatctagaccaggaaaaaaacactatattaaaataagagtaggggcaccaaaaatgttcactgataaatggtacccccaaacagatctttgtgacatggtgcttctaactgtctatgcaaccgcagcggatatgcaatatccgttcggctacccactaactgactctgtggttgtgaacttccaggttctgcaatccatgtatgataaatacattagcatattaccagaccaaaagtcacaaagagagtcactacttagtaacatagcaaattacattcccttttataataccacacaaactatagcccaattaaagccatttatagatgcaggcaatataacatcaggcacaacagcaacaacatggggatcatacataaacacaaccaaatttactacaacagccacaacaacttatacatatccaggcactacaactaacacagttactatgttaacctctaatgactcctggtacagaggaacagtatataacaatcaaattaaagagttaccaaaaaaagcagctgaattatactcaaaagcaacaaaaaccttgctaggaaacaccttcacaactgaagactgcacactagaataccatggaggactatacagctcaatatggctatcccctggtagatcttactttgaaacaccaggagcatacacagacatgaagtacaacccattcacagacagaggagaaggcaacatgttatggatagactggctaagcaaaaaaaacatgaactatgacaaagtacaaagtaaatgcttagtatcagacctacctctatgggcagcagcatatggttatttagaattctgctctaaaagcacaggagacacaaacatacacatgaatgccagactactaataagaagtccttttacagacccccagctaatagcacacacagaccccactaaaggctttgtaccctattccttaaactttggaaatggtaaaatgccaggaggtagcagcaatgttcccataagaatgagagctaagtggtaccccactttattccaccaacaagaagttctagaggccttagcacagtcaggaccctttgcttatcactcagacattaaaaaagtatctctaggcataaaataccgttttaagtggatctggggtggaaaccccgttcgccaacaggttgttagaaacccctgcaaggaaccccactcctcggtcaatagagtccctagaagcatacaaatcgttgacccgaaatacaactcaccggaacttaccatccatgcctgggacttcagacgtggcttctttggcccgaaagctattcaaagaatgcaacaacaaccaactgctactgaatttttttcagcaggccgcaagagacccagaagggacacagaagtgtatcagtccgaccaagaaaaggagcaaaaagaaagctcgcttttccccccagtcaagctcctccgaagagtccccccatgggaggactcggaacaggagcaaagcgggtcgcaaagctcagaggaagagacccacaccgtctcccagcagctcaaacagcagcttcagcagcagcggatcctcggcgtcaagctcagagtcctgttccaccaagtccacaaaatccaacaaaatcaacatatcaaccctaccttattgccaaggggtggggccctagcatccttgtctcagattgcaccataa

SEQ ID NO: 162 - DNA, 2313 bp, Torque teno virus
  source 1..2313: mol_type = other DNA
atggcctatggcttgtggcaccgaaggagaagacggtggcgcaggtggaaacgcacaccatggaagcgccgctggaggacccgaagacgcagacctgctagacgccgtggccgccgcagaaacgtaaggagacgccgcagaggagggaggtggaggaggagatataggagatggaaaagaaagggcaggcgcagaaaaaaagctaaaataataataagacaatggcaaccaaactacagaaggagatgtaacatagtaggctacatccctgtactaatatgtggcgaaaatactgtcagcagaaattatgccacacactcagacgataccaactacccaggaccctttggggggggtatgactacagacaaatttactttaagaattctgtgtgacgagtacaaaaggtttatgaactactggacagcatctaacgaagacctagacctttgtagatatctaggagtaaacctgtactttttcagacacccagatgtagattttatcataaaaattaataccatgcctccttttctagacacagaactcacagcccctagcatacacccaggcatgctagccctagacaaaagagcaagatggatacctagcttaaaatctagaccaggaaaaaaacactatattaaaataagagtaggggcaccaaaaatgttcactgataaatggtacccccaaacagatctctgtgacatggtgcttctaactgtctatgcaaccacagcggatatgcaatatccgttcggctcaccactaactgactctgtggttgtgaacttccaggttctgcaatccatgtatgataaaacaattagcatattaccagacgaaaaatcacaaagagaaattctacttaacaagatagcaagttacattcccttttataataccacacaaactatagcccaattaaagccatttatagatgcaggcaatgtaacatcaggcgcaacagcaacaacatgggcatcatacataaacacaaccaaatttactacagcaaccacaacaacttatgcatatccaggcaccaacagacccccagtaactatgttaacctgtaatgactcctggtacagaggaacagtatataacacacaaattcaacagttaccaataaaagcagctaaattatacttagaggcaacaaaaaccttgctaggaaacaacttcacaaatgaggactacacactagaatatcatggaggactgtacagctcaatatggctatcccctggtagatcttactttgaaacaacaggagcatacacagacataaagtacaatccattcacagacagaggagaaggcaacatgttatggatagactggctaagcaaaaaaaacatgaactatgacaaagtacaaagtaaatgcttagtacgagacctacctctatgggcagcagcatatggatatgtagaattctgtgcaaaaagtacaggagacaagaacatatacatgaatgccaggctactaataagaagtccctttacagacccacaactactagtacacacagaccccacaaaaggctttgttccttactctttaaactttggaaatggtaaaatgccaggaggtagtagtaatgtgcctattagaatgagagctaaatggtatccaacattatttcaccagcaagaagtactagaggccttagcacagtcaggcccctttgcataccactcagacattaaaaaagtatctctgggtatgaaataccgttttaagtggatctggggtggaaaccccgttcgccaacaggttgttagaaatccctgcaaagaaacccactcctcgggcaatagagtccctagaagcttacaaatcgttgacccgaaatacaactcaccggaactcacattccatacctgggacttcagacgtggtctctttggcccaagagctattcaaagaatgcaacaacaaccaacaactactgacattctttcagcaggccgcaagagacccagaaaggacacggaggtgtaccaccccagccaagaaggggagcaaaaagaaagcttacttttccccccagtcaagctcctcagacgagtccccccgtgggaagactcgcagcaggaggaaagcgggtcgcaaagctcagaggaagagacgcagaccgtctcccagcagctcaagcagcagctgcagcaacagcaaatcctgggagtcaaactcagactcctgttcgaccaagtccaaaaaatccaacaaaatcaagatatcaaccctaccttgttaccaagggggggggatctagcatcgttatttcaaatagcaccataa

SEQ ID NO: 163 - DNA, 2313 bp, Torque teno virus
  source 1..2313: mol_type = other DNA
atggcctatggctggtggcgccgaaggagaagacggtggcgcaggtggagacgcagaccatggaggcgccgctggaggacccgaagacgcagacctgctagacgccgtggccgccgcagaaacgtaaggagacgccgcagaggagggaggtggaggaggagatataggagatggaaaagaaagggcaggcgcagaaaaaaagctaaaataataataagacaatggcaaccaaactacagaaggagatgtaacatagtaggctacatccctgtactaatatgtggcgaaaatactgtcagcagaaactatgccacacactcagacgatactaactacccaggaccctttggggggggtatgactacagacaaatttactttaagaattctgtatgacgagtacaaaaggtttatgaactactggacagcatctaacgaagacctagacctttgtagatatctaggagtaaacctatactttttcagacacccagatgtagattttattataaaaattaataccatgcctccttttctagacacagaactcacagcccctagcatacacccaggcatgctagccctagacaaaagagcaagatggatacctagcttaaaatctagaccaggaaaaaaacactatattaaaataagagtaggggcaccaaaaatgttcactgataaatggtacccccaaacagatctttgtgacatggtgcttctaactgtctatgcaaccgcagcggatatgcaatatccgttcggctcaccactaactgactctgtggttgtgaacttccaggttctgcaatccatgtatgatgaaaaaattagcatattaccagaccaaaaatcacaaagagaaagcctacttactagcatagcaaattacattcccttttataataccacacaaactatagcccaattaaagccatttatagatgcaggcaatgtaacatcaggcacaacagcaacaacatgggggtcatacataaacacaaccaagtttactacaacagccacaacaacttatacatatccaggcaccaccacaaccacagtaactatgttaacctctaatgactcctggtacagaggaacagtatataacaaccaaattaaagacttaccaaaaaaagcagctgaattatactcaaaagcaacaaaaaccttgctaggaaacaccttcacaactgaagactacacactagaataccatggaggactgtacagctcaatatggctatcccctggtagatcttactttgaaacaccaggagcatatacagacataaagtacaatccatttacagacagaggagaaggcaacatgttatggatagactggctaagcaaaaaaaacatgaactacgacaaagtacagagtaaatgcttaatatcagacctacctctatgggcagcagcatatggatatgtagaattttgtgcaaaaagtacaggagaccagaacatacacatgaatgccaggctactaataagaagtccctttacagacccacaactactagtacacacagaccccacaaaaggctttgttccttactctttaaactttggaaatggtaaaatgccaggaggtagtagtaatgtgcctattagaatgagagctaaatggtatccaacattatttcaccagcaagaagtactagaggccttagcacagtcaggcccctttgcataccactcagacattaaaaaagtatctctgggtatgaaataccgttttaagtggatctggggtggaaaccccgttcgccaacaggttgttagaaatccctgcaaagaaacccactcctcgggcaatagagtccctagaagcttacaaatcgttgacccgaaatacaactcaccggaactcacattccatacctgggacttcagacgtggcctctttggcccgaaagctattcagagaatgcaacaacaaccaacaactactgacattttttcagcaggccgcaagagacccaggagggacaccgaggtgtaccactccagccaagaaggggagcaaaaagaaagcttacttttccccccagtcaagctcctcagacgagtccccccgtgggaagactcgcagcaggaggaaagcgggtcgcaaagctcagaggaagagacgcagaccgtctcccagcagcccaagcagcagctgcagcaacagcgaatcctgggagtcaaactcagactcctgttcaaccaagtccaaaaaatccaacaaaatcaagatatcaaccctaccttgttaccaagggggggggatctagcatccttatttcaagtagcaccataa

SEQ ID NO: 164 - DNA, 2313 bp, Torque teno virus
  source 1..2313: mol_type = other DNA
atggcctatggctggtggcgccgaaggagaagacggtggcgcaggtggagacgcagaccatggaggcgccgctggaggacccgaagacgcagacctgctagacgccgtggccgccgcagaaacgtaaggagacgccgcagaggagggaggtggaggaggagatataggagatggaaaagaaagggcaggcgcagaaaaaaagctaaaataataataagacaatggcaaccaaactacagaaggagatgtaacatagtaggctacatccctgtactaatatgtggcgaaaatactgtcagcagaaactatgccacacactcagacgataccaactacccaggaccctttggggggggtatgactacagacaaatttactttaagaattctgtatgacgagtacaaaaggtttatgaactactggacagcatctaacgaagatctagacctttgtagatatctaggagtaaacctgtactttttcagacacccagatgtagattttatcataaaaattaataccatgcctccttttctagacacagaactcacagcccctagcatacacccagacatgctagccctagacaaaagagcaagatggatacctagcttaaaatctagaccgggaaaaaaacactatattaaaataagagttggggcaccaaaaatgttcactgataaatggtacccccaaacagatctttgtgacatggtgcttctaactgtctatgcaaccacagcggatatgcaatatccgttcggctcaccactaactgactctgtggttgtgaacttccaggttctgcaatccatgtatgatgaaaacattagcatattaccaaccgaaaaatcaaaaagagatgtcctacatagtactatagcaaattacactcccttttataataccacacaaattatagcccaattaaggccatttgtagatgcaggcaatctaacatcagcgtcaacaacaacaacatggggatcatacataaacacaaccaagtttaatacaacagccacaacaacttatacatatccaggcagcacgacaaccacagtaactatgttaacctgtaatgactcctggtacagaggaacagtatataacaatcaaattagcaagttaccaaaacaagcagctgaattttactcaaaagcaacaaaaaccttgctaggaaacacgttcacaactgaggaccacacactagaataccatggaggactgtacagctcaatatggctatccgctggtagatcttactttgaaacaccaggagcatatacagacataaagtataatccattcacagacagaggagaaggcaacatgttatggatagactggctaagcaaaaataacatgaactatgacaaagtacaaagtaaatgcttaatatcagacctacctctatgggcagcagcatatggatatgtagaattttgtgcaaaaagtacaggagaccagaacatacacatgaatgccagactactaataagaagtccctttacagacccacaactactagtacacacagaccccacaaaaggctttgttccttactctttaaactttggaaatggtaaaatgccaggaggtagtagtaatgtgcctattagaatgagagctaaatggtatccaacattatttcaccagcaagaagtactagaggccttagcacagtcaggcccctttgcataccactcagacattaaaaaagtatctctgggtatgaaataccgttttaagtggatctggggtggaaaccccgttcgccaacaggttgttagaaatccctgcaaagaaacccactcctcgggcaatagagtccctagaagcttacaaatcgttgacccgaaatacaactcaccggaactcacattccatacctgggacttcagacgtggcctctttggcccgaaagctattcagagaatgcaacaacaaccaacaactactgacattttttcagcaggccgcaagagacccaggagggacaccgaggtgtaccactccagccaagaaggggagcaaaaagaaagcttacttttccccccagtcaagctcctcagacgagtccccccgtgggaagactcgcagcaggaggaaagcgggtcgcaaagctcagaggaagagacgcagaccgtctcccagcagctcaagcagcagctgcagcaacagcgaatcctgggagtcaaactcagactcctgttcaaccaagtccaaaaaatccaccaaaatcaagatatcaaccctaccttgttaccaagggggggggatctagcatccttatttcaaatagcaccataa

SEQ ID NO: 165 - DNA, 2313 bp, Torque teno virus
  source 1..2313: mol_type = other DNA
atggcctatggctggtggcgccgaaggagaagacggtggcgcaggtggagacgcagaccatggaggcgccgctggaggacccgaagacgcagacctgctagacgccgtggccgccgcagaaacgtaaggagacgccgcagaggagggaggtggaggaggagatataggagatggaaaagaaagggcaggcgcagaaaaaaagctaaaataataataagacaatggcaaccaaactacagaaggagatgtaacatagtaggctacatccctgtactaatatgtggcgaaaatactgtcagcagaaactatgccacacactcagacgataccaactacccaggaccctttggggggggtatgactacagacaaatttactttaagaattctgtatgacgagtacaaaaggtttatgaactactggacagcatctaacgaagatctagacctttgtagatatctaggagtaaacctgtactttttcagacacccagatgtagattttatcataaaaattaataccatgcctccttttctagacacagaactcacagcccctagcatacacccaggcatgctagccctagacaaaagagcaagatggatacctagcttaaaatctagaccgggaaaaaaacactatattaaaataagagttgaggcaccaaaaatgttcactgataaatggtacccccaaacagatctttgtgacatggtgcttctaactgtctatgcaaccacagcggatatgcaatatccgttcggctcaccactaactgactctgtggttgtgaacttccaggttctgcaatccatgtatgatcaaaacattagcatattaccaaccgaaaaatcaaagagaacacaactacatgataatataacaaggtacactcccttttataataccacacaaactatagcccaattaaagccatttgtagatgcaggcaatgtaacaccagtgtcaccaacaacaacatggggatcatacataaacacaaccaagtttactacaacagccacaacaacttatacatatccaggcaccacgacaaccacagtaactatgttaacctgtaatgactcctggtacagaggaacagtatataacaatcaaattagccagttaccaaaaaaagcagctgaattttactcaaaagcaacaaaaaccttgctaggagacacgttcacaactgaggactacacactagaataccatggaggactgtacagctcaatatggctatccgctggtagatcttactttgaaacaccaggagtatatacagacataaagtataatccattcacagacagaggagaaggcaacatgttatggatagactggctaagcaaaaaaaacatgaactatgacaaagtacaaagtaaatgcttaatatcagacctacctctatgggcagcagcatatggatatgtagaattttgtgcaaaaagtacaggagaccaaaacatacacatgaatgccaaactactaataagaagtccctttacagacccacaactactagtacacacagaccccacaaaaggctttgttccttactctttaaactttggaaatggtaaaatgccaggaggtagtagtaatgtgcctattagaatgagagctaaatggtatccaacattatttcaccagcaagaagtactagaggccttagcacagtcaggcccctttgcataccactcagacattaaaaaagtatctctgggtatgaaataccgttttaagtggatctggggtggaaaccccgttcgccaacaggttgttagaaatccctgcaaagaaacccactcctcgggcaatagagtccctagaagcttacaaatcgttgacccgaaatacaactcaccggaactcacattccatacctgggacttcagacgtggcctgtttggcccgaaagctattcagagaatgcaacaacaaccaacaactactgacattttttcagcaggccgcaagagacccaggagggacaccgaggtgtaccactccagccaagaaggggagcaaaaagaaagcttacttttcctcccagtcaagctcctcagacgagtccccccgtgggaagactcgcagcaggaggaaagcgggtcgcaaagctcagaggaagagacgcagaccgtctcccagcagctcaagcagcagctgcagcaacagcgaatcctgggagtcaaactcagactcctgttcaaccaagtccaaaaaatccaacaaaatcaagatatcaaccctaccttgttaccaagggggggggatctggcatccttatttcaaatagcaccataa

SEQ ID NO: 166 - DNA, 2298 bp, Torque teno virus
  source 1..2298: mol_type = other DNA
atggcctatgggtggtggaggagacgccgcagaaggtggaagagatggaggagaaggcccaggtggagacgcccatggaggacccgcagacgcagacctgctagacgccgtggacgccgcagaacagtaaggagacgggagcgcgggaggtggaggaggcgctataggaggtggaggaaaaagggcaaacgcaggataaaaaagaaacttataataagacagtggcagccaaactataccagaaagtgcgacatattaggctacatgcctgtaatcatgtgtggagagaacactctaataagaaactatgccacacacgcaaacgactgctactggccgggaccctttgggggcggcatggccacccagaaattcacactcagaatcctgtacgatgactacaagaggtttatgaactactggacctcctcaaacgaggacctagacctctgtagatacaggggagtcaccctgtactttttcagacacccagatgtagactttatcatcctgataaacaccacacctccgttcgtagatacagagatcacaggacccagcatacatcctggcatgatggccctcaacaagagagccaggttcatccccagcctaaaaactagacctggcagaagacacatagtaaagattagagtgggggcccccaaactgtacgaggacaaatggtacccccagtcagaactctgtgacatgcccctgctaaccgtctacgcgaccgcagcggatatgcaatatccgttcggctcaccactaactgacactcctgttgtaaccttccaagtgttgcgcagcatgtacaacgacgcccttagcatacttccctctaactttgaacaggacgacaatgcaggccaaaaactttacaatgaaatatcatcatatttaccatactacaacaccacagaaacaatagcacaactaaagagatatgtagaaaatacagaaaaaatttccacaacaccaaacccatggcaatcaaattatgtaaacactattaccttcaccactgcacaaagtattacaactacaaccccatacaccaccttctcagacagctggtacaggggcacagtatacaaaaacgcaatcactaaagtgccacttgccgcagctaaactttatgaaacccaaacaaaaaacctgctgtctccaacatttacaggagggtccgagtacctagaataccatggaggcctgtacagctccatatggctatcagcaggccgatcctactttgaaacaaagggagcatacacagacatatgctacaacccctacacagacaggggagaagggaacatgttgtggatagactggctatccaaaggagattccagatatgacaaagcacgcagcaaatgtctaatagaaaaactacctatgtgggccgcagtatatgggtacgcagaatactgtgcaaaagccacaggagactctaacatagacatgaacgccagagtagtaatgaggtgtccatacaccgtaccccaaatgatagacacaagcgatcccctcagaggctttataccctatagctttaactttggaaagggaaaaatgcctggaggaacaaatcaagtccccataagaatgagagctaagtggtacccttgtctctttcaccaaaaagaagttctagaagctataggacagtcaggccccttcgcctaccatagtgatcagaaaaaagcagtactaggcctaaaatacagatttcactggatatggggtggaaaccccgtgtttccacaggttgttagaaacccctgcaaagacacccaaggttccacaggccctagaaagcctcgctcagtacaaatcattgacccgaagtacaacacaccagagcttaccatccacgcgtgggatttcagacgtggcttctttggcccaaaagctattaaaagaatgcaacaacaaccaacagatgctgaacttcttccaccaggccgcaagaggagcaggagagacaccgaagtcctgcaaagcagccaagaaaggcaaaaagaaagcttacttttacaacagctccacctccagggacgagtacccccgtgggaaagcttgcaagggttgcagacagaaacagaaagccaaaaagagcacgagggcaccctttcccagcagatcagagagcaggttcagcagcagaagctcctcgggagacagctcagagaaatgttcttacaactccacaaaatcctacaaaatcaacacgtcaaccctaccttattgccaagggatcagggtttaatttggtggtttcagattcagtaa

SEQ ID NO: 167 - DNA, 2298 bp, Torque teno virus
  source 1..2298: mol_type = other DNA
atggcttatgggtggtggaggagacgccgcaggaggtggaagagatggaggagaaggcccaggtggagacgcccatggaggacccgcagacgcagacctgctggacgccgtggacgccgcagaacagtaaggagacggaggcgcgggaggtggaggaggcgctataggaggtggaggaaaaagggcagacgcaggagaaaaaagaaacttataataagacaatggcagccaaactataccagaaagtgcaacatagttggttacatgccagtcatcatgtgtggagagaacactctaatcagaaactatgccacacacgcatacaactgctcctggccgggaccctttgggggcggcatggccacccaaaaatttactctgagaatactgtacgatgactacaaaagatttatgaactactggacctcctcaaacgaggacctagacctgtgcagatatagaggagctacactgtactttttcagagacccagatgtagactttattatactgataaacaccactcctccatttgtagacacagagattacagggcccagcatacatcccggcatgctggcactcaacaagagagcaagatttatacccagcttaaagactagacccagcagaagacacatagtaaagatcagagtgggggcccccaaactgtatgaggacaagtggtacccccagtcagaactttgtgacatgcccctgctaaccgtctatgcgaccgcaacggatatgcaatatccgttcggctcaccactaactgacactcctattgtaaccttccaagtgttgcgcagcatgtacaacgacgcccttagcatacttccctctaactttgaaggtgacgacagtgcaggcgcaaaactttacaaacaaatatcagaatacataccatactataacaccacagaaacaatagcacagttaaagggatatgtagaaaacacagaaaaaacccaaacaacacctaatccatggcaatcaaaatatgtaaacacaaaaccatttgacactgcacaaacaattacaaaccaaaagccatacactccattcgcagacacatggtacaggggcacagcatacaaagaagaaattaaaaatgtaccactaaaagcagccgaactgtatgaattacatactacacacctgttatctacaacattcacaggagggtccaaatacttagaataccatggaggcttatacagctccatatggctgtcagcaggccgctcctactttgaaacaaaaggagcatacacagacatttgctacaacccctacacagacaggggagaaggcaacatggtgtggatagactggctagtaaagacagactctagatatgacaagacacgcagcaaatgccttatagaaaaactacctctatgggctgcagtatacgggtacgcagagtactgcgccaaggccacaggagactctaacatagacatgaacgccagagtagttatcaggagcccctacactacacctcaaatgatagacaccaacgactctctaagaggctttatagtatacagctttaactttggaaagggaaaaatgcctggaggaacaaatcaagtccccataagaatgagagctaagtggtacccttgcctctttcaccaaaaagaagttctagaagctataggacagtcaggccccttcgcctaccatagtgatcagaaaaaagcagtactaggcctaaaatacagatttcactggatatggggtggaaaccccgtgtttccacaggttgttagaaacccctgcaaagacacccaaggttccacaggccctagaaagcctcgctcagtacaaatcattgacccgaagtacaacacaccagagcttaccatccacgcgtgggatttcagacgtggcttctttggcccaaaagctattaaaagaatgcaacaacaaccaacagatgctgaacttcttccaccaggccgcaagaagagcaggagagacaccgaagtcctgcaaagcagccaagaaaggcaaaaagaaagcttacttttccaacagctccagctccagcgacgagtacccccgtgggaaagctcgcaagggtcgcagacagaaacagaaagccaaaaagagcaggagggcaccctctcccagcagctcagagagcagcttcagcagcagaagctcctcggcagacagctcagggaaatgttcctacaaatccacaaaatcctacaaaatcaacaagtcaaccctattttattgccaagggatcaggctttaatttcctggtttcagattcagtaa

SEQ ID NO: 168 - DNA, 2298 bp, Torque teno virus
  source 1..2298: mol_type = other DNA
atggcctatgggtggtggaggagacgccgcaggaggtggaagagatggaggagaaggcccaggtggagacgccgctggaggacccgcagacgcagacctgctggacgccgtagacgccgcagaacagtaaggagacgcaggcgcgggaggtggaggagcagatataggagatggaggcgaaagggcagacgcaggcgaaaagaaaaactaataataagacaatggcagccaaactataccagaaagtgcaacattgtgggttacatgccagtaatcatgtgtggagaaaatactgttatcagaaactatgccacacacacatacgactgctcctggccaggaccctttgggggcggcatggccacccaaaaatttactctgagaatactgtacgatgactacaaaagatttatgaactactggacctcctcaaacgaggacctagatctctgcagatacagaggagcaaccctatactttttcagagacccagatgtagactttattatacttataaacactactcctccatttgtagacacagaaataacagggcccagcatacacccaggcatgctggcactaaacaaaagagctagattcattcccagtctaaaaaccagaccaggcaggagacacatagtaaaaataaaagtaggggcccctagaatgtatgaagacaagtggtacccccagtcagaactttgtgacatgcccctcctaacgatctatgcaaccgcaacggatatgcaacatccgttcggctcaccactaactgacactcctgttgtaaccttccaagtgttgcgcagcatgtacaacgacgcccttagcatacttccctctaactttgaagacgattcaagtccaggggctgcactttacaaacaaatatcagaatacataccatactataacaccacagaaacaatagcacagctaaagagatatgtagaaaacacagaaaaaacccaaacaacacttaatccatggcaatcaagatatgtaaacacaacactatttaacactgcagaaacaattgcaaaccaaaagccatacactaaattcgcagacacatggtacaggggcacagcatacaaagacgcaattaaagacataccactaaaagcagccgaattgtatgtaaaccaaaccaaatacctgttatctacaacattcacaggagggtccaaatacttagaataccatggaggcttatacagctccatatggctgtcagcaggccgctcctactttgaaacaaaaggagcatacacagacatttgctacaacccctacacagacaggggagaaggcaacatggtgtggatagactggctatcgaaaacagactcaaaatatgacaagacccgcagcaaatgccttatagaaaaactgccgctatgggcatcggtatacgggtacgcagaatactgtgccaaggccacaggagactctaacatagacatgaacgccagagtagttataagatgcccctacactacacctcaaatgatagacaccaccgacccaactagagggttcatagtatacagctttaactttggtaagggcaaaatgccgggaggtagcaatgaagtacccataagaatgagagccaaatggtacccctgcctctttcaccaaaaagaggtcctagaagccataggccagtcaggcccctttgcttatcacagcgatcaaaaaaaagcagttttaggtttaaaatacaaatttcactggatatggggtggaaaccccgtgttcccacaggttattaaaaacccctgcaaaaacactcaattttccacaggccctagaaagcctcgctcattacaaatcattgacccgaattacaacacaccaaagcttaccatccacgcttgggatttcagacttggcttctttggcccaaaagctattaaaagaatgcaacaacaaccaacagatgctgaacttcttccaccaggccgcaagaggagcaggagagacaccgaagtcctgcaaagcagccaagaaaggcaaaaaggaaacttacttttccaacagttccagctccagcgacgagtacccccgtgggaaagctcgcaagggtcgcagacaggaacacaaagccaaaaagagcaggagggcaccctctcccagcagctcagagagcagcttcagcagcagaagctcctcggcagacagctcagggaaatgttcctacaactccacaaaatccaacaaaatcaacacgtcaaccctaccttattgccaagggatcaggctttaatttgctggtttcagattcagtaa

SEQ ID NO: 169 - DNA, 2313 bp, Torque teno virus; identical to SEQ ID NO: 163
  source 1..2313: mol_type = other DNA

SEQ ID NO: 170 - DNA, 2202 bp, Torque teno virus
  source 1..2202: mol_type = other DNA
acggcttggtggtggggcagatggaggcgccgctggaggcctcgctatcgcagacgcacctggagggtacgaagaagacgacctagacgaacttttcgccgccgccgccgaggacgatatgtgagtaggcggaggcgccgccgctactacaggcgcagactgagacggggcagacgcagagggcgacgaaagagacacagacagactctagtcctcagacagtggcaaccagacattgtcagacactgtaaaattacaggatggatgccccttatcatctgtggctcagggagcacacagaacaattttataactcacatggacgactttcctcccatgggctactccttcgggggcaactttacaaacctctccttctccttagagggcatttatgaacaatttctgtaccacagaaacaggtggtctcgctccaaccatgacctagacctagccagatacaaaggcacaactctaaaactctacagacaccacaccttagactacatagtcagctacaacagaacaggccctttccagatcagtgacatgacctacctcagcacacaccctgcactcatgctactccagaaacacagaatagtagtacccagcctactcactaaacctaaaggcaagagatccataaaagttagaataaagccaccaaaactcatgctcaacaaatggtacttcaccaaagacatatgcagcatgggcctcttccaactacaggccacagcatgcaccctatacaacccctggctcagagacaccacaaaaagcccagtcataggcttcagagtacttaaaaacagtatttatacaaacctcagcaacctaccagaacatgatcaaaccagacaagccattagacgaaaactacacccagactccttaacaggatcaactccatatcaaaaaggctgggaatacagctacacaaaactaatggctccaatatactatcaagcaaatagaaacagcacatacaactggctaaattatcaaacaaactatgctcaaacattcaccaaatttaaagaaaaaatgaatgaaaaccttgcactaattcaaaaagagtattcataccactatcccaacaatgtcactacagaccttattggcaaaaacaccctcacacatgactggggtatatacagtccctactggctaacacccaccagaataagcctagactgggaaacaccctggacatatgtcagatacaatccactagcagacaagggcataggcaatgctgtctatgcacaatggtgctcagaacagaccagtaaattagatacaaaaaagagcaagtgcataatgaaagacctgccactgtggtgcatattttatggctatgtagattggataataaaatccacaggagtcagcagcgcagtcactgacatgagagtagccatcatcagcccctacaccgaaccagcacttatagggtcaagtccagacgtaggctacattccagtaagtgacaccttttgcaatggagacatgccgtttcttgctccatacatccctgtgggctggtggatcaaatggtaccctatgattgcacaccaaaaggaagtgtttgaggcaatagttaactgtggaccgtttgtgcccagagaccagaccactcccagttgggaaattaccatgggttacaaaatggactggttatggggtggctctcccctgccttcacaggcaatcgacgacccctgccagaagcccacccacgaactacccgatcccgatagacaccctcgcatgttacaagtctctgacccgacaaagctcggaccgaagacagtgttccacaaatgggactggagacgtgggatgcttagcaaaagaagtattaaaagagtccaggaggactcaacagatgatgaatatgttgcagggcctttaccaagaaaaagaaacaaattcgataccagagcccaagggctgcaaacccccgaaaaagaaagctacactttactccaagccctccaagagtcggggcaagagaccagctcagaagaccaagaacaagcaccccaagaaaaagagggtcagaaggaagcgctcatggagcagctccagctccagaaacagcaccagcgagtcctcaagcgaggcctcaaactcctcctcggagacgtcctccgactccggagaggagtccactgggaccccctcctgtcataa

SEQ ID NO: 171 - DNA, 2202 bp, Torque teno virus
  source 1..2202: mol_type = other DNA
acggcgtggtggtggggcagatggaggcgtcgatggaggcctcgctatcgcaaacgcacctggagattacggagacgacgacctagacgaacttttcgccgccgccgccgaagacaatatgtgagtaggcggaggcgccgccgctactacaggcgcagactgagacggggcagacgcagagggcgacgaaagagacacagacagactctagtcctcagacaatggcaaccagacgttgttagacactgtaaaattacaggatggatgccccttatcatctgtggctccgggagcacacagaacaattttataactcacatggacgactttcctcccatgggctactcctttgggggcaactttacaaacctcaccttctccttagagggcatatatgaacaatttctgtaccacagaaacaggtggtctcgctccaaccatgacctagacctagccagatacaaaggcacaactctaaaactctacagacaccacaccttagactacatagtcagctacaacagaacaggccccttccagatcagtgacatgacctaccccagcacacaccctgcacttatgctactccagaaacacagaatagtagtgcccagcgtactcactaaacctaaaggcaagagatccataaaggtcagaataaagccaccaaaactcatgcttaacaagtggtacttcaccaaagacatatgcagcatgggcctttttcaactacaggccacagcatgcaccctatacaatccctggctcagagacaccacaaaaagcccagtcataggcttcagggtacttaaaaacagtatctatacaaacctcagcaacctaccagaccatgagggttccagagaagccataagaaaaaaactacacccacaatccttaacaggacactctcccaaccaaaaaggctgggaatacagctatactaaactaatggctccaatatactactctgccaacagaaacagtacatataactggctaaactatcaagacaactatgtagccacatatactaaattcaaagtcaaaatgacagacaacttacaactaatacaaaaagaatactcataccactatcccaacaataccactacagaccttattaagaacaacacccttacacatgactggggcatatacagtccctactggctaacacccaccagaataagcctagactgggaaacaccctggacatatgtaagatacaacccactggcagacaaaggcataggcaatgctgtctacgcacagtggtgctcagaacagacaagcaaattagacccaaaaaagagcaagtgcataatgagagacctgccactgtggtgcatattttatggctatgtagattggatagtaaaatccacaggagtcagcagcgcagtcactgacatgagagtagccattagaagcccctacactgaaccagcacttatagggtcaactgaagatgtaggcttcattccagtaagtgacaccttttgcaacggagacatgccgtttcttgctccatacattcctgtgggctggtggatcaagtggtaccccatgattgcacaccaaaaggaagtgtttgagcaaatagtaaactgtggaccgtttgtgcccagagaccagaccactcccagttgggaaattaccatgggttacaaaatggactggttatggggtggctctcccctgccttcacaggcaatcgacgacccctgccagaagcccacccacgaactacccgatcccgatagacaccctcgcatgttacaagtctctgacccgacaaagctcggaccgaagacagtgttccacagatgggactggagacgtgggatgcttagcaaaagaagtattaaaagagtccaggaggactcaacagatgatgaatatgttgcagggcctttaccaagaaaaagaaacaagttcgataccagagcccaagggctccaaagccccgaaaaagaaagctacactttactccaagccctccaagagtcggggcaagagagcagctcagaagaccaagaacaagcaccccaagaaaaagagggtcagaaggaagcgctcatggagcagctccagctccagaaacagcaccagcgagtcctcaagcgaggcctcaaactcctcctcggagacgttctccgactccggagaggagtacactgggaccccctcctgtcataa

SEQ ID NO: 172 - DNA, 2202 bp, Torque teno virus
  source 1..2202: mol_type = other DNA
acggcgtggtggtggggcagatggaggcgccgctggaggcctcgctatcgcagacgcacctggagggtacgcagaagacgacctagacgaacttttcgccgccgccgccgaggacgatatgtgagtaggcggaggcgccgccgctactacaggcgcagactcagacggggcagacgcagagggcgacgaaagagacacagacagactctagtcctcagacaatggcaaccagacgttcttagacgctgtaaaattacaggatggatgccccttatcatctgtggctccggaagcacacagaacaattttataactcacatggacgactttcctcccatgggctactcctacgggggcaactttacaaacctcaccttctccttagagggcatatatgaacaatttctgtaccacagaaacaggtggtctcgctccaaccatgacctagacctagccagatacaaaggcacaactctaaaactctacagacaccacaccttagactacatagtgagctacaatagaacaggccctttccagatcagtgacatgacctacctcagcacacaccctgcacttatgctactccagaaacacagaatagtagtgcccagcctactcactaaacctaaaggcaagagatccataaaagttagaataaaaccaccaaaactcatgcttaacaagtggtacttcaccaaagacatatgcagcatgggcctttttcaactacaggccacagcatgcaccctatacaacccctggctcagagacaccacaaaaagcccagtcataggcttcagggtacttaaaaacagtatttatacaaacctcagcaacctaccagaccatgaaggagccagagaggccataagaaaaaaactacacccacaatccttaacaggatctgtcccaaaccaaaaaggttgggaatacagctacacaaaactaatggctcccatttactaccaagccattagaaacagcacatacaactggctaaactatcaacaaaattactcacaaacataccaaacctttaaacaaaaaatgcaagacaacttacaactaatacaaaaagaatacatgtaccactacccaaacaatgtaacaacagacatactaggcaaaaacacacttacacatgactggggcatatacagtccctactggctaacacccaccagaatcagcctagactgggaaacaccttggacatatgttagatacaatccactagcagacaagggcataggcaatgctgtctatgcacagtggtgctcagaacagaccagtaacttagatacaaaaaagagcaagtgcataatgaaagacctgccactgtggtgcatattttatggctatgtagattgggtagtaaaatccacaggcgtcagcagcgcagtgactgacatgagagtagccatcattagcccctacactgaaccagcacttatagggtcaagtccagaggtaggctacattccagtaagtgacaccttttgcaatggagacacgccgtttcttgctccatacatccctgtgggctggtggatcaagtggtaccccatgattgcacaccaaaaggaagtgtttgaggcaatagtaaactgtggaccgtttgtgcccagagaccagaccactcccagttgggaaattaccatgggttacaaaatggactggttatggggtggctctcccctgccttcacaggcaatcgacgacccctgccagaagcccacccacgaactacccgatcccgatagacaccctcgcatgttacaagtctctgacccgacaaagctcggaccgaagacagtgttccacaaatgggactggagacgtgggatgcttagcaaaagaagtattaaaagagtccaggaggactcaacagatgatgaatatgttgcagggcctttaccaagaaaaagaaacaagttcgataccagagcccaagggctccaaagccccgaaaaagaaagctacactttactccaagccctccaagagtcggggcaagagacgagctcagaagaccaagaacaagcaccccaagaaaaagagggtcagaaggaagcgctcatggagcagctccagctccagaaacagcaccagcgagtcctcaagcgaggcctcaaactcctcctcggagacgttctccgactccggagaggagtacactgggaccccctcctgtcataa

SEQ ID NO: 173 - DNA, 2358 bp, Torque teno virus
  source 1..2358: mol_type = other DNA
atggcacaggggaggcgcagatacagacggggttggcaacgcagggtgtatctgagacgcaggagacgcaggagacgaaagagacttgtactgactcagtggcaccccgcagttaggagaaaatgcaccatcacggggtacatgcccgtggtgtggtgcggacacggcagggccagctacaactacgcctggcattcagatgactgtataaaacagccctggccctttggagggtctctgtccaccgtgtcctttaaccttaaagtactgtatgacgaaaaccagaggggacttaacagatggacgtaccccaacgatcagctagacctcggccgctacaagggctgcaaactaacattctacagaaccaaaaataccaactacccaggaccctttggggggggtatgactacagacaaatttactttaagaattctgtatgacgagtacaaaaggtttatgaactactggacagcatctaacgaagacctagacctttgtagatatttaggagtaaacctgtacattttcagacacccagatgtagattttatcataaaaattaataccatgcctccttttctagacacagaaatcacagccgctagcatacacccaggcatactagccctagacaaaagagcaagatggatacctagcttaaaatctagaccaggaaaaaaacactatattaaaataagagtaggggcaccaaaaatgttcactgataaatggtacccccaaacagatctctgtgacatggtgcttctaactatctatgcaaccgcagcggatatgcaatatccgttcggctcaccactaactgacactgtggttgtgaacttccaggttctgcaatccatgtatgatgaaaacattagcatattaccagaccaaaagacacaaagagagaaactacttactagcatatcaaactacattcccttttataataccacacaaactatagcccaattgaagccatttgtagatgcaggcaataaagtatcaggcacaacaacaacaacatgggcatcatacataaacacaaccagatttactacaacagccacaacaacttatacatatccaggctctaccactaacacagtaactatgttaacctctaatgactcctggtacagaggaacagtatataacaatcaaattaaaaacttaccaaaacaagcagctgaattatactcaaaagcaacaaaaaccttgctaggaaacaccttcacaactgaagactacacactagaataccatggaggactgtacagctcaatatggctatcccctggtagatcttactttgaaacaccaggagcatacacagatataaagtacaatccatttacagacagaggagaaggcaacatgttatggatagactggctaagcaaaaaaaacatgaactatgacaaagtacaaagtaaatgcttagtatcagacctacctctatgggcagcagcatatggatatgtagaattttgtgcaaaaagtacaggagaccagaacatacacatgaatgccaggctactaataagaagtccctttacagacccacagctactagtacacacagaccccacaaaagcctttgttccctactctttaaactttggaaatggtaaaatgccaggaggtagtagtaatgtgcctattagaatgagagctaaatggtatcccactttattccaccaacaagaagttctagaggctttagcgcagtcaggacccttcgcttatcactcagacattaaaaaagtatctctaggcataaaataccgttttaagtggatctggggtggaaaccccgttcgccaacaggttgttagaaatccctgcaaggaaccccactcctcgggcaatagagtccctagaagcatacaaatcgttgaccagaaatacaactcaccggaacttaccatccattcctgggacttcagacgtggcttctttggcccgaaagctattcaaagaatgcaacaacaaccaactgctactgaatttttttcagcaggccgcaagagacccagaagggacacagaagtatatcagtccgaccaagaaaaggagcaaaaagaaagctcgcttttccccccagtcaagctcctccgaagagtccccccgtgggaggactcggacaggaagcaaagcgggtcgcaaagctcagaggaagagacgcagaccgtctcccagcagctcaagcagcagctgcagcaacagcgaatcctgggagtcaaactcagactcctgttctaccaaatccaaagaatccaacaaaatcaagatatcaaccctaccttgttaccaagggggggggatctagcatccttatttcaaatagcataa

SEQ ID NO: 174 - DNA, 2247 bp, Torque teno virus
  source 1..2247: mol_type = other DNA
atggcgtggacctggtggtggcagaggaggcgccgaaggtggccgtggagaaggagaaggtggagaagactacgcacaagaagacctagacgccttgttcgacgccgtcgcaagagatacagagtaaggagacggaggcggtggggaaggagacgtgggcgacgcacataccttagacgcggacttaaaaagagaaaaaggagaaaaaaactcagactgactcagtggaaccctagcacaattaggggatgtacaattaagggaatggcgcccctaatagtgtgcggccacaccatggctggcaataactttgccatccgaatggaggactatgtatctcagattaaaccgttcggagggtccttcagtaccaccacctggagcttaaaagtactgtgggacgagcacaccagattccacaacacctggagctacccaaacactcagctagacttagccaggttcaaaggagtaaccttctacttctacagagacaaagacacagactttattataacctatagctccgtgccaccttttaaaatagacaaatactcctcagccatgctacacccaggcatgcttatgcagagaaaaaagaagatattattacccagctttacaaccagacctaggggcagaaaaaaagttaaagtacacataaaacctcctgtcttatttgaagacaaatggtacacccagcaggacctgtgcgacgttaatcttttgtcacttgcggtttctgcggcttcctttagacatccgttctgcccaccacaaactgacaacatttgcataaccttccaggtgttgaaagacaagtattacacacaaatgtcagttacaccagataccgcaggtacaaaaaaagacgacgaaattcttgaccacttatactcaactgcagaatactatcaaactgttcacacacaaggaataattaacaaaacacaaagagtagctaaattctccacctctaataataccctaggtgaccaaagtgagatatcattatatttaaaccaaccaacaacaactaacataggaaacacgttatccacaggccataactcagtgtatggctttccatcatacaacccacaaaaagacaaacttagaaaaatagcagactggttttggacacaggaagccaacaaagagaatgtagttacaggctcatactcaatgcctactaacaaagcagtaggctatcacctaggaaaatatagccctatattcctaagttcatacagaaccaacctacaatttagaacagcatacacagacgttacatacaacccactaaatgacaaaggtaaaggcaatgaaatttgggtacaatatgtaacaaaaccagacactgtgttcaaccccacacagtgtaaatgccatgtaatagatttacccttgtggtcagcattccatggatacatagactttgtacaaagtgaactaggaattcaagaagaaatactaaacattgccattatagtagttatatgtccatacacaaaacctaaactagtacatgagacaaacccaaaacaaggctttgtattctatgacactcaatttggagacggtaaaatgccagagggctcaggcctagtaccgatatactaccaaaacagatggtatcctagaataaagtttcagagtcaagtagtgcatgactttatactaacaggcccctttagctacaaagatgacctaaaaagcacagtactaacagtagaatacaagttcaaattcttatggggcggcaatatgattcccgaacaggttatcagaaacccttgtaaaacagaaggacacgatctccctcacaccagtagactccatcgcgacttacaagttgttgacccacacaccgtgggcccccaatgggcgctccacacctgggactggcgacgtggactctttggttcagaggctatcaaaagagtgtctgaacaacaagtacatgatgaactgtattacccaccttcaaagaaacctcgattcctccctccaatatcaggcctccaagagcaagaaagagactacagttcgcaggaggagaaagaacagtcctcctcagaagaagagacggacccgaagaaaaaagagcaaaaacagcagcagcgactccacctccagttccaagagcagcagcgactcggaaaccaactccgactcatcttccgagagctacagaaaacccaagcgggtctccacttaaatcctatgttatcaaaccggctgtaa

SEQ ID NO: 175 - DNA, 2181 bp, Torque teno virus
  source 1..2181: mol_type = other DNA
atggcatggggatggtggaagcgacggcggcgctggtggttccggaagcggtggacccgtggcagacttcgcagacgatggcctagaccagctcgtcggcgccctagacgacgaagagtaaggagacgcagacgatggaggagggggcgacctagacgcagactgtaccgacgctacagacgcaaaaaacgtaggagacgaaagcccaaaataatcttaaaacaatggcagccagacattgtaaagaggtgctacatagtgggctacattcctgccataatatgcggggcgggcacctggtcccacaactacaccagccaccttctagacattatccccaaaggaccctttggagggggacacagcaccatgagattctctctaaaagtgctcttcgaagagcacctcagacacctaaacttttggacacgtagtaaccaggatctagaacttgtaagatacttcagatgctcctttaggttttacagagaccaacacacagactacttagtgcactacaacagaaaaacacccctgggaggcaacagactgacagcacctagccttcacccaggggtgcagatgctaagcaaaaacaaaataatagtacccagctatgatactaaacctaagggcaaaagctatgtaaaagtaactatagcaccccccactctactaactgacaagtggtactttgctaaagacgtttgtgacacaaccttggttaacttagacgttgtactctgcaacttgcggtttccgttctgctcaccacaaactgacaacccttgcatcactttccaagttctccattctatctataacgacttcctctctatagtagatactcaagaatataaaaataattttgttactaccttatctacaaaactaggcacaacatgggggtcaagacttaacacctttagaacagaagggtgctacagtcacccaaaactacctaaaaaacaggttacagctgctaatgacagtacatactttacacaaccagacggactatggggagatgcagttttcgagactaaagatactactattattaccaaaaacatggaatcatatgcaacatcagccaaacaaaggggagtgaacggagaccccgcattttgccatcttacaggcatatactcacctccctggctaacaccaggaagaatatccccagaaaccccaggactttacacagacgtgacttacaacccatacgcagacaaaggagtgggaaaccgaatatgggtagactactgcagtaaaaaaggcaataaatatgacaatacaagtaaatgccttttagaagacatgccactatggatggtcacctttggctacgtagactgggtaaaaaaagagactggcaactggggcattccactatgggccagagtactaataagaagcccctacacagtgccaaaactttacaacgaagcagacccctcctacggatgggttcctatctcctattattttggagaaggaaaaatgccaaacggagacatgtacgtacccttcaaagttagaatgaagtggtacccgtccatgtggaaccaagaaccagtactaaatgacttagcaaagagcggaccgtttgcatacaaagacacaaaaaccagtgtgactgtgactactaaatacaaatttacatttaacttcgggggcaaccccgtaccctcacagattgtacaagatccctgcacccagcccacctatgacatccccggcaccggtaacctgcctcgcagaatacaagtcattgacccgaaagtcctcggtccccactactcattccaccggtgggacttcaggcgtggcctctttggccaacaagctattaagagagtgtcagaacaacaaacaacttctgagtttttattctcaggtccaaagagacccagaatcgatcaagggccttacatcccgccagaaaaaggctcagattcactccaaagagaatcgagaccgtggagcacctcggagagcgaggcagagacagaagccccctcggaagaagagccggagaaccaagaagagcaagtactccagttgcagctccgacagcagctccgagaacagcgaaaactcagacagggaatccagtgcctcttcgagcaactgataacaacccagcagggggtgcacaaaaacccattgttagagtag

SEQ ID NO: 176 - DNA, 2292 bp, Torque teno virus
  source 1..2292: mol_type = other DNA
atggcctatggctggtgggcccggagacggagacgctggcgccgctggaagcgcaggccctggagacgccgatggaggacccgcagacgcagacctcgtcgccgctatagacgccgcagacatgtaaggagacggagacgtgggaggtggaggaggaggtacagaaaatggcgcagaaaaggcaggagaaggggcaaaaaaaagattataataagacagtggcagcccaactacaggagacgctgcaacataataggctacatgcccgtgcttatctgtggcaacaatactgtgtccagaaactatgccacacactcagatgactcctacctgccaggaccctttggagggggcatgaccactgataaattcaccctaagaatactctatgatgagtactgtagattcatgaactactggacagcctctaacgaggacctggacctctgcagatacagaggctgtactctgtggttcttcagacacccagatgtagactttattatccttataaacaccatgtcgcccttcctcgacacccagctcacaggccccagcatacacccgggactaatggcccttaacaagagagccagatggatccccagcctaaaaagcagaccgggtagaaagcacgtagttaaaattagagtaggcgctcccagaatgttcacagataaatggtacccccagtcagatctgtgtgacctccccctactaactatctttgccagtgcagcggatatgcaatatccgttcggctcaccactaactgactctgtggttgtgggtttccaggttctgcaatccatgtacaatgactgccttagcatacttcctgaaaattttaacggcaatggcaaaggcaaagctttacatgacaacataactaagtatctccctaactataacactactcaaacactagctcagctaaaaccgtacatagataacacatccacaggaagcacaaataactggagcagctatgtaaatacatcaaaatttacaactgcttcaaaaaccattacaacctcagcagaaggcccatactatactttcgcagatacctggtacagaggcactgcatacaacaatagcattacgaacgttcctttacaggcagcacaactatatcacgacacaaccaaaaaactactaggcacaacatttacaggagggtccccctacctagaataccacggaggcctttactcctccatttggctatctgcaggtcgctcctactttgaaacaaaaggcacatacacagatataacctacaacccttttacagacagaggacaaggtaacatggtatggatagactgggtatccaaatatgactcagtttactctaaaacacaaagcaaatgccttatagaaaacctgccactgtgggcatcagtatatggatacgcagaatactgcagcaaatccacaggagacacaaacatagaacaaaactgcagagtagttataagaagccccttcactaaccctcagctgctagaccataacaacccactaagagggtacgttccctactccataaactttggcaacggaaaaatgcctgggggaagcagtcaggtccccataagaatgagaagcaagtggtaccctactctatttcaccaaaaagaagtgttagaggccatagcgcaggcgggccccttcgcgtaccacagtgatcagatgaaagtgtcactaggcatgaaatacgcctttaagtgggtgtggggtggcaaccccgtatcccaacaggttgttagaaacccctgcaaggacaccggtgtttcctcgggcaatagagtccctcgatcagtacaaatcgttgacccgaagtacaacactccagaacttgcaatacatgcctgggacttcagacgtgcctgtttggcccaaaagctattaagagaatgcaaacagaaccgtaccctactgaacttctttcgccagggcgaaaaagatacaggagagacacagaagctctactccccagccaagaagaacaacaaaaagaaaacttatttttcctcccaatcaagcagctccgaccaatcccccgttggaggagtcggaccaaagccaaagcgaggaagagggggtccaacaagagacgcagacactctcccagcagctccagcagcagctcaaggagcagcagctcatgggggtccaactccgagccctgtaccaacaattacaacgggtccaacaaaacacacatatcgaccctacctttttgcaaggggggcgggcgtaacatctttatttcaaacagcgtag

SEQ ID NO: 177 - DNA, 2283 bp, Torque teno virus
  source 1..2283: mol_type = other DNA
atggcgtggtggggcagatggagaaggtggccgcggcgccggtggaggagatggcggcgccgccgtagaaggagactaccaacaagaagaactcgacgagctgttcgcggccttggaagacgaccaagaaagacggtaaggagacgccggcgccgacccagacgcacttaccgacgggggtggcgacgcagacggtacataagacgcaggaggggacgcagaaagaaactgactctgactatgtggaaccccaacatagtgaggagatgtaacatagagggagggctgcctctaatactgtgtggagaaaacagggccgcatttaactacgcctaccactcagaggactacacagagcagccattccccttcggtggaggaatgagcaccaccacattctcactgagaggcctctatgaccagtacacaaaacacatgaacagatggacgttctcaaacgaccagctagacctcgccagatacaggggctgcaaattcaggttttacagacaccccacctgtgactttatagtgcactacaacctggttcctcctctaaagatgaaccagttcaccagtcccaacacgcacccgggactcctcatgctgactaaacacaaaataataatacccagcttcttaacaagaccagggggtcgcagattcgtaaagatcagactgcccccccctaagctgtttgaagacaagtggtacacccagcaggacttgtgcaaacaaccgttagttactctaaccgcaaccgcagcttccttgcggtatccgttctgctcaccacaaacgaacaaccccaactgtaccttccaggtactgcgcaaaaattaccacaaagtaataggtacttcctcaacaaacagtgaggacgtgaccccctttgaaaactggctatataatacagcctcacactatcaaacttttgccaccgaggcacaagttggtagaataccaagctttaacccagacggtacaaaaaatacaaaagaatctgaatggcaaaattactggtccaaaaaaggtgaaccatggaaccctaatagtagttacccacatacaactacaaatcaaatgtacaaaataccttttgacagcaactatggctttccaacttacaaaccaataaaagaatacatgttacaaagaagagcatggagtttcaaatatgaaacagacaacccagttagcaaaaagatctggccacaacctaccacaacaaaaccaacaatagactactatgaataccacgcaggctggttcagtaacatcttcataggccccaacagacacagcttacaattccaaacagcatacgtagacaccacatacaacccactgaatgacaaaggaaagggcaacaagatatggtttcagtatcacagcaaagtaaacacagacctcagagacagaggcatctactgcctcctagaagacatgcccctgtggtctatgacctttggatacagtgactatgtcagcacacagctaggcccaaacgtggaccacgagactcaaggccttgtgtgcataatatgcccgtacactgagcccccaatgtatgacaagaccaatccaaacagtggctatgtagcatatgacacaaactttggaaatggcaagatgccgtcaggcagaagccaggtacccgtgtactggcagtgcagatggaggcccatgttgtggttccagcagcaagtactgaatgacatctcaaaaagtggaccgtacgcatacagagacgaactgaaaaactgttgcctgactgcttactacaacttcatttttgactgggggggcgacatgtattacccgcaggtcattaaaaacccctgcgcagacagcggactcgtacccggtaccagtagattcactcgagaagtacaagtcgttagcccgctgtccatgggcccccagtacatcctccatctcttcgaccaaagacgcgggttctttagttcaaacgctcttaaaagaatgcaacaacaacaagaatttgatgagtcttttacagtcaaacctaagcgacccaaactttctacagccgcccacgtcgagcagcaagaagaagactcgagttcaagggaaagaaaatcggggtcctcacaagaagaagtccaggaagaagtcctccagacgccggagatccagcttcacctccagcgaaacatcagagaacagctgcacatcaagcagcagctccaactcctgttactccaattattcaaaacacaagcaaatatccacctgaacccacgttttataagcccataa

SEQ ID NO: 178 - DNA, 2319 bp, Torque teno virus; identical to SEQ ID NO: 103
  source 1..2319: mol_type = other DNA

SEQ ID NO: 179 - DNA, 1281 bp, Torque teno virus
  source 1..1281: mol_type = other DNA
atggcatggggatggtggagacgaaggcgcaagtggtggtggagacgccggttcgcccgaagcagacttcgcagacgacggattagacgccctcgtcgccgcactcgacgaagaacagtaaggaggcgcagacaatggaggagggggcgacccagacgcagactgtttaagagaaagagacgctttaagagacgcagacgaaaagctaagataaaaataactcagtggcagcctagctcagtgaagagatgttttgttataggatactttccattagtaatatgtggacccggaaggtggtcagaaaactttactagtcacatagaagacaaaataagcaaaggaccctttgggggagggcatagtactagcagatggtccttaaaagtactgtacgaagagttccaaagacaccacaacttttggacaagaagcaacaaagacctagagttagttagattctttggaagtagttggagattttacagacacgaggacactgactatatagtgtactactctagaaaggctccccttggaggtaaccttctaacagcacccagcctacacccaggagcagccatgcttagcaaacacaaaatagtagtacccagttttaaaaccagacccggtggaaaacccaccgttaaaattaatattaaaccccctacaacactaatagacaaatggtacttccagaaagacatttgtgacacaaccttccttaacttgaacgttgtactctgcaacctgcggtttccgttctgctcaccacaaactgacaacatttgtgtaaccttccagatattgcatgaggtttaccacaattacataagcataactgcaaaagagttacttacaggcacagaatggagacagtactacaaaaactttttaaacgcagcactaccaaatgacagatctgtaaataaattaaacacttttagcacagaaggagcctacagccacccacaaataaaaaaacatacagaaaatataacaggttcaggagacaaatactttagaaaaaaagatggactgtggggagatgctattcacattacagaccaacaaaacagaacagaagttatagacttaatattaaaaaatgcagaaaactacctcaaaaaagtacaacaggaataccaaggacaggaaaatttaaaaaaccttatacatcccgtcttttgtcagtacgtaggcatatttgggcagcccactactaaactaccacagaataagcccagaaattccaggcctgtacaaagacataatatataa

SEQ ID NO: 180 - DNA, 2220 bp, Torque teno virus
  source 1..2220: mol_type = other DNA
atgtcctggtggggatggcgccgccgatggtggtggaagccacggaggcgatggagacgcaggagggcgcgccgcccgagacgactaccgcgacgacgatatagaagacctactcgccgctatcgaggcagacgagtaaggaggcgccgcgcggggggctggcgggggcgacgcagatactcccgacgctatagcagacgactgactgtcagacgaaagaaaaagaaactaactcttaagatctggcagccacagaatatcaggagatgtaagataaggggtctactgcccctcctgatatgcggacacacccgatctgcctttaactatgccatccactcggatgacaagaccccccaacagcagagtttcgggggtgggctcagcaccgttagcttctccctgaaagtcctattcgacccgaaccagaggggacttaacaggtggtcggccagcaacgaccagcttgacctcgcccggtacacgggctgcacgttctggttctacagacacaaaaagactgactttatagtgcagtatgatgtcagcgcccccttcaaactagacaaaaacagttgtcccagctaccaccccttcatgctcatgaaggccaaacacaaggtcctcatccccagttttgacactaaacccaaaggcagagaaaagataaaactaaggatacagccccccaagatgttcatagataagtggtacactcaggaggacctatgccccgttattcttgtgacacttgtggcgaccgcagcttcctttacacatccgttctgctcaccacaaactgccaacccttgcatcaccttccaggttttgaaagaattctattaccaagccatggggtacggcacaccagaaaccacaatgagcacaatatggaacaccctctacacaactagcacctactggcagtcacacttaaccccacagtttgtcagaatgcccaaaaacaatcctgataacactgcgaacactgaggccaataagtttaatgagtgggttgacaaaacgtttaaaacaggcaagttagttaaatacaactataaccagtataaacctgacatagagaaactaaccctactaagacaatactactttcgatgggagacacagcatacaggggtcgcagtcccacctacgtggactacccccacaacagacagatacgagtaccacgtaggcatgttcagtcccatcttcctcaccccttatagatcagcgggcctagactttccgtacgcctacgcagacgtcacatacaatcccctcacagacaaaggggtgggcaaccgcatgtggtaccagtacaacactaagatagacacccagttcgacgccaaatgctgtaagtgcgtcctagaggacatgcccctctatgccatggccttcggccacgcagactttctagaacaggagataggagagtaccaggacctagaggccaacggatacgtgtgtgttatcagtccctacaccaagccccccatgttcaacaaacacaaccctcagcagggatacgtgttctatgactcacagtggggcaatggcaaatggatagacggcaccgggttcgtcccagtgtactggctgaccagatggagagtagaactgctatttcaaaagcaagtactctcagacctcgccatgtcagggcccttcagctatccagacgaacttaagaacacagtactgacggccaagtacagatttgactttaagtggggtggcaatctcttccaccaacagaccattagaaacccctgcaaacccgaagagacctcgaccggtagaatccctcgcgatgtacaagtcgttgacccggtcaccatgggcccccgattcgtctttcactcctgggactggaggagagggttccttagtgacagagctctcaaaagaatgtttgagaaaccgctcgattttgagggatttacagcgactccaaaacgacctcgcatactccctcccacagagggacagctcgcccgagagcaaaaagagcaagaagaaagctcagattcgcaggaagaaagcagccttaccccgctcgaagaagtcccgcaagagacgaagctacgactccacctcagaaagcagctccgagagcagcgaagcatcagacaccaactcagaaccatgttccagcagcttgtcaagacgcaagcgggcctacacctaaacccccttttatcttcccagctgtaa

SEQ ID NO: 181 - DNA, 2001 bp, Torque teno virus
  source 1..2001: mol_type = other DNA
atgtggaatccatccacaattagagcatgtaacataaagggtgctataaaccttgtaatgtgcggacacactcaggcaggcagaaactatgccattagaagtgaagacttttatcctcaaatacaaagctttggtgggtcatttagtacaactacatggagccttagagtactgtttgatgaataccaaaagttccacaacttttggacatatcctaatactcagctagatctatgtagatataaatatgctatatttaccttttacagagaccctaaagtagactacattgttatatacaacacaaatccaccatttaaaattaacaaatacagtagtccctttttacaccccggacttatgatgttacaaaaaaaaaaaatactaatacctagctttcaaacaaaaccagggggcaaatctagaattaaggttaaaattaagccccctgctctatttgaagacaagtggtacactcaacaagacttgtgtccagtaaacctgttgtcacttgcggtttccgcctgcagctttatacatccgttctgctcaccagaaagtgacacaatatgcatgacatttcaggtattgcgagagttttactacacacacctaactgtcactccaaccacaactacctccacaccagaaaaagacaaaaaaatatttaatgaccaattatactccaacgctaacttttatcaatcgctacacgcatcagcgttcttaaacattgctcaggcacctgctatacatggccacaatggaataccaaacaacagtaggtatttaagttccacaggtacagaaacaagttttagaactggaaacaatagtatatatggacaaccaaattataaaccaattccagagaaattaacagaaataagaaagtggtttttcaaacaagctacaacacctaatgaaattcatggcacatatggaaaaccaacatatgatgcagtagactaccacttaggcaaatacagtccaatattcttaagtccatacagaactaacacacaatttcccactgcatacatggatgtaacttataatccaaatgtagataaaggaaaaggcaacaaaatatggcttcaatcagtaacaaaagaaacatctgattttgactcacgtagctgcagatgtataatagaaaacttacccatgtgggccatggttaacgggtactcagactttgcagagtctgaattaggatctgaagtacacgctgtatatgtttgctgtattatttgtccttacacaaaacctatgctatataacaaaacaaacccagcaatgggctatatattttatgatactttatttggcgacggaaaactaccatcaggtccaggtcttgttccattttattggcaaagcagatggtatccaaaactagcttggcaacaacaagtactacatgatttttatttgtgtggcccctttagctacaaagatgacctcaaaagctttactataaacacaacttacaagtttaaattcttatggggtggaaatatgattcccgaacaggttatcaaaaacccgtgcaaaacaacagatccaacatacaccctgtccgatagacagcgtcgcgacctacaagttgttgacccaattaccatgggcccgcagtgggaattccacacctgggactggcgacgcggactgtttggacaaaatgctcttagaagagtgtcagaaaaaccaggagatgatgcagagtattatgcgcctccaaaaaaacctagatttttcccaccaacagacctcgaagagcaagaaaaagactcagattcacaggaggagacgagactcctattccacccgtcgccgccaaggagccaagaagagatccagcaagagcagcagcgagacatccacctcagactcggacaacaactcagaatcagacagcagctccagcaagtgttcttacaagtcctcaaaacgcaagcgaacctccacataaatccattattcttaaaccaacaataa

SEQ ID NO: 182 - DNA, 2238 bp, Torque teno virus
  source 1..2238: mol_type = other DNA
atggcatggggatggtggagacggtggcgccggtggcccaccagacgctggaggagacgccgtcgccggcgccccgtacggagaacaagagctcgccgacctgctcgacgctatagaagacgacgaacagtaagaaccaggcggaggcggtgggggcgcagacggtacagacggggctggagacgaaggacttatgtaaggaaggggcgacacagaaaaaagaaaaagagactcgtactgagacagtggcagccagccaccagacgcagatgcactataactgggtacctgcccatagtgttctgcggacacactaagggcaataaaaactatgcactacactctgacgactacaccccccaaggacagccatttggaggggcccttagcactacctctttctccctaaaagtgttgtatgaccagcaccagaggggactaaacaagtggtcttttcccaacgaccagctagaccttgccagatacagaggctgcaaattctacttctatagaaccaaacagactgactgggtgggccagtatgacatatcagaaccctacaagctagacaagtacagctgccctaactaccacccgggaaacatgattaaggcaaagcacaaatttttaattccaagctatgatactaatcccagagggagacaaaaaattatagttaaaattccccccccagacctttttgtagacaagtggtacactcaggaagacctgtgtgacgttaatcttgtgtcatttgcggtttctgcggcttcctttctccacccattcggctcaccacaaactgacaacccttgctacaccttccaggtgttgaaagaattctactatcaggcaataggctttagtgcaacagaggaaaaaatacaaaatgtttttaacatattatacgaaaacaactcatactgggaatcaaacataactcccttttatgtaattaatgttaaaaaagggtctaacacagcacagtacatgtcacctcaaatttcagacgcagattttagaaataaagtaaatactaactacaactggtatacctacaatgccaaaacccataaagaaaaattaaaaacgctaagacaagcatactttaaacaattaacctctgaaggtccgcaacacacatcctctcacgcaggctacgccactcagtggaccacccccagcacagacgcctacgaataccacctaggcatgtttagtaccatctttctagccccagacagaccagtacctcgctttccctgcgcctaccaagatgtcacctacaatgccttaatggacaaaggggtgggcaaccacgtgtggtttcagtacaacacaaaggcagacactcaactaatactcaccggagggtcctgcaaagcacacatagaaaacatacccctgtgggcagccttctatggctacagcgacttcatagagtcagagctaggcccctttgtagacgcagagacagtaggccttatatgtgtaatctgcccctacactaaaccccccatgtacaacaagacaaatcccatgatggggtacgtgttttatgacagaaattttggtgacggcaaatggactgacggacggggcaaaatagagccctactggcaggttaggtggaggccagaaatgctttttcaagagactgtaatggcagacatagttcaaaccgggccctttagctacaaggacgaacttaaaaacagcacactagtgtgcaaatacaaattctatttcacctggggaggtaacgtgatgttccaacagacgatcaaaaacccatgcaagacggacgaacaacccaccgactccggtagacaccctagaggaatacaagtggcggacccggaacaaatgggaccccgttgggtgttccactcctttgactggcgaaggggctatcttagcgagaaagctctcaaacgcctgcaagaaaaacctcttgactatgacgaatattttacacaaccaaaaagacctagaatgtttcctccaacagaatcagcagaaggagagttccgagagcccgaaaaaggctcgtattcagaggaagaaaggtcgcaagcctctgccgaagagcagacgaaagaggcgacagtacttctccttaaacgacgactcagagagcaacagcagctccagcagcagctccaatttctcacccgagaaatgttcaaaacgcaagcgggtctccacctaaaccctatgttattaaaccagcggtga

SEQ ID NO: 183 - DNA, 456 bp, Torque teno virus
  source 1..456: mol_type = other DNA
atgcgcttttccagaatctacaggccaaagaaagggccactgccactgcctctggtgcgagcagaacagaaaaaacagcctagtgatatgagttggcgccctccgcttcacaatggggcaggaatcgagcgtcagtttttcgaaggctgctttcgattccacgctagttgttgcggctgtggcaattttgttactcatattactctactggctgctcgctatggttttactggggggccgacgccgccaggtggtcctggggcgctaccctcgctaaggagagcgctgccacctcctccggccccccaagaccaggctgaaccagagctatggcgtggtcgtggtggtggaggcgaaggaaacgctggtggccgcgcagaaggaggcgatggagaaggctacgaacccgaagaactggaagagctgttccgcgccgccgccgccgacgacgagtaa

SEQ ID NO: 184 - DNA, 2229 bp, Torque teno virus
  source 1..2229: mol_type = other DNA
atggcgttccggtggtggtggtggagacgccgcccgcagcgacgatggacccggcgccgatggaggagactacgaacccgccgacctagacgcactgtacgacgccgtcgccgcagaccaagagtaaggagaaggcggtggggcaggagacgtgggcgacgcagactgtacagacgcacatatagaaaaaggcgcaaaagacgaaaaaaaatgaccttaaaaatgtggaatccatccacaattcgcgcctgtaacattaggggcttcatagcactagtagtctgtggacacactcgtgcaggctgtaactatgccatacacagcgaagactacatacctcaactaagaccctacggagggtctttcagcactactacttggagtctaaaactactatttgacgaatatctgaaatttagaaacaaatggagctaccccaacacagaactaaaccttgctagatacaggggagccacatttacattttacagagaccccaaagtagactatatagtagtatacaacacagtacctccatttaaacttaacaaatacagctgccccatgctgcacccaggtatgatgatgcagtacaaaaagaaagttttaataccaagctatcagacaaaaccaaagggaaaagccaaaataagacttagaataaaacctccagttttatttgaagacaaatggtacacccagcaagacctgtgtcccgttaatcttttgtcacttgcggttagcgcatgttccttcctgcatccgtttataccaccagaaagtgacaacatatgcataacgttccaggtgttgcgagacttttattacacacaaatgtcagttacacccacaacaaccacttccctaaatcagaaagatgaaaaaatatttagtgaccacttatataaaaaccctgaatactggcaatcacatcacacagctgctagactatctacctctcaaaaacctgcactacgaaataaagaagaaatacctaatgatcacggatacttaaacacaacaccaactgacagtacttttagaactggaaacaatacaatatatggccaaccaagctacagaccaaactataccaaactaactaagattagagaatggtactttacacaagaaaacacagacaacccaatacatggcagctacttaaaaccaacactaaactctgtagactaccacctaggaaaatacagtgctatattcttaagtccctatagaacaaacactcaatttgatacagcataccaagatgtaacctacaatcctaacacagacaaaggcaaaggcaataaaatatggattcagagctgtacaaaagaatccaccatactagacaacgcatgcagatgtgtaatagaagacatgccattatgggctatggtaaatggctacttagaattctgtgactcagagcttccaggagccaacatctacaatacatacatagtagttgttatatgcccttacaccaaacctcaactactaaacaaaactaatccaaaacaaggctatgtattttatgacactctatttggagacggaaaaatgcccacaggaacaggcctagtaccgttctggctgcagagcagatggtaccccagagcagagttccaacaacaagtactacatgacctttaccttacaggcccatttagctacaaagatgacctaaaatcctttagctttaatgctaaatacaaattctcattcttatggggcggcaatatgattccccaacagattatcaaaaacccgtgtaaaaaagaagaatccacattcacctatcccagtagagagcctcgcgacctacaagttgttgacccactcaccatgggcccagaatgggtcttccacacatgggactggagacgtggactttttggtaaaaatgctgtcgacagagtgtcaaaaaaaccagacgatgatgcagaatattatccagtaccaaaaaggcctcgattcttccctccaacagacacacagtcagagccagaaaaagacttcggtttcacaccggagagccaagagttacagcaagaagacttacgagcaccccaagaagaaagccaagaggtacagcagcagcgactgctccagctcagactctcacagcagttcagactcagacagcagctccagcacctgttcgtacaagtcctcaaaacccaagcaggtctccacataaacccattatttttaaaccatgcataa

SEQ ID NO: 185 - DNA, 2253 bp, Torque teno virus
  source 1..2253: mol_type = other DNA
atggcgtggacctggtggtggcagaggaggcgccgaaggtggccgtggagaaggagaaggtggagaagactacgcaccagaagacctagacgacttgttcgccgccgtcgcaagagatacagagtaaggagacggaggcggtggggaaggagacgtgggcgacgcacataccttagacgcagacttaaaaaaagaaagagacgcaaaaagctaagactgactcaatggaaccctagcacaattagaggatgtacaattaagggaatggctcccctaattatctgtggccacactatggcaggcaataactttgccatccgaatggaggactatgtctctcaaattagaccattcggagggtcgtttagcaccacaacctggagccttaaagtactttgggacgagcacaccagattccataacacctggagctacccaaacactcagctagatctcgcaaggtttaaaggagtaaacttttacttctacagagacaaagacacagactttatagtaacatacagctcagtcccgccatttaaaatggacaaatactcatcagccatgctacatccaggcacgctcatgcagagaaagaaaaagatattaatacccagctttacaacaagaccaaggggccgaaaaaaagttaaactgcatataaaacctcctgttttatttgaagacaaatggtacacccagcaggacctctgcgacgttaatcttttgtcacttgcggtttctgcggcttcctttagacatccgttctgcccaccacaaactgacaacatttgcatcactttccaggtgttgaaagacttctattacacacaaatgtcagttacaccggacacagcaggccaagaaaaagacattgaaatatttgaaaaacacttatttaaaaatccacaattctatcaaactgtccacacacaaggaataattagcaaaacacgaagaacagctaaattttcaacctcaaataataccctaggaagtgacacgaatataacgccatacctagaacaaccaacagcaacaaaccacaaaaacacattatccacaggtaacaactcaatatatggccttccatcttacaacccaataccagataaacttaaaaaaattcaagaatggttttggaaacaagaaactgacaaagaaaatttagttactggctcctatcaaacacctactaacaaatcagtaagctaccatctaggaaaatacagccccatatttttaagctcatatagaactaatctacagtttataactgcatacacagatgtaacatacaatcccctaaatgacaaaggaaaaggcaaccaaatatgggtacagtatgtaacaaaaccagatactatatttaatgaaagacagtgcaaatgccacatagtagatattcctttgtgggcagcattccatggctatattgactttatacaaagtgaactaggcatacaagaagaaatactaaacattgccataatagtagttatatgtccatacacaaaacccaaactagtacacgacccaccaaaccaaaaccaaggctttgtattctatgacacacaatttggagacggtaaaatgccagagggctcgggcctagtacccatatactaccaaaacagatggtatcctagaataaagttccagagtcaagtagtgcatgactttatactaacaggcccctttagctacaaagatgatctaaagagcacagtactaacagtagaatacaagtttaaattcttatggggcggcaatatgattcccgaacaggttatcagaaacccttgtaaaacagaaggacacgatctccctcacaccagtagactccatcgcgacttacaagttgttgacccacacaccgtgggcccccaatgggcgctccacacctgggactggcgacgtggactctttggttcagaggctatcaaaagagtgtctgaacaacaagtacatgatgaactgtattacccagcttcaaagaaacctcgattcctccctccaatatcaggcctccaagagcaagaaagagactacagttcgcaggaggaaaaagaccagtcctcctcagaagaagagaaggacccgaagaaaaaagagcaaaaacagcagcagcgactccacctccagttccaagagcagcagcgactcggaaaccaactccgactcatcttccgagagctacagaaaacccaagcgggtctccacataaatcctatgttatcaaaccggctataa

SEQ ID NO: 186 - DNA, 2268 bp, Torque teno virus
  source 1..2268: mol_type = other DNA
atggcctggagatggtggtggagacggcgctggaagccaagaaggcggccagcgtggaccaagtaccgcagacgcaggtggagacgacttcgaccccgcagacctagaagacttgctcgcggccgtcgaagaagacgaacagtaaggaggcggagggtcaggagactcagacggaggagggggtggactaggagacggtacttgagacgcagaaagagacgaaagctaatactgactcagtggaaccccaatattgtcagacgatgctctataaagggtataatccccctcacaatgtgcggcgctaacaccgccagttttaactatgggatgcacagcgacgacagcacccctcagccagagaaatttgggggaggcatgagcacagtgacctttagcctgtatgtactgtatgaccagttcactagacacatgaaccggtggtcttattccaacgaccagctagacctggccagatacaggggctgctcattcaaactgtacagaaaccccacaactgactttatagtgcagtatgacaataatcctcctatgaaaaacactatactgagctcacctaacactcacccaggtatgctcatgcagcagaaacacaggatactagtgcccagctggcagacctttcccagggggagaaaatatgttaaagttaagatacccccacctaaactctttgaggaccactggtacactcagccagacttatgcaaagttccgctcgttactctgcggtcaaccgcagctgacttcagacatccgttctgctcaccacaaacgaacaacccttgcaccaccttccaggtgttgcgagagaactataacgaagtcctaggacttccctatgctaacaccgggtctaacaatgaagtcaaaattaaaattgataactttgaaaactggctttataactccagtgtacactatcaaacattccaaacagagcaaatgttcagacccaaacaatacaatgcagatggctctacctggaaagactacaaaagcatgttatctacatggacatcacaaatatataacaagaaaacagacagcaactatgggtatgcctcctatgactttagtaaaggtaaagagtttgctacacaaatgagacagcattactgggtacaactaacacaactaacagccacagtcccacacataggacctacttacagcaacacaaccacaccagaatacgaatatcacgcaggctggtactctccagtgttcataggccccaacagacacaacatacagttcagaacagcatacatggacgttacctacaacccactaaatgacaaaggccagtttaacagagtatggttccagtacagcactaaacccaccacagacttcaacaacacacagtgcaaatgtgttctagaaaacattccactgtggtcagccctatttggatactctgaatatgtagagagccagctaggccccttccaggaccacgggaccgtgggtgtagtagtagtacaatgtccttacacagtgccacccatgtataacaaagagaaaccagacatgggctacgtattctatgacacacattttggcaatggcaaattgggcaacggcagcggccaggtacccaggtactggcagatgagatggtaccccatactcaaaagacaaaaacaagtaatgaatgacatttgcaagactggaccgttcagctacagagacgaactgcttcaggtggacttagcaagcccctacaccttcagatttaactgggggggcgacttactctaccaccaggtcatcaaagacccgtgcagctcctcaggactggcacctaccgactccagtagattcaagcgggatgtacaagtcgttagcccgctcacaatggggccccgactgctattccactcgttcgaccaaagacgagggttctttactccaggagctatcaaacgaatgcatgatgaacaaattaatgttccagactttacacaaaaacctaaaatcccgcgaattttcccaccagtcgagctccgagaaagagcagaagccgaagaagactcaggttcggaaaaagcgtcgttcacctcgtcgcaagagagagaagccgaagcccaagaaaagttaccgatacagctccagctcagacagcagctcagacaacaacagcagctccgagtccacttgcagcaagtcttcctccaactccaaaaaacgaaggcacatttacatataaacccactatttttggcccaagggaacatgtaa

SEQ ID NO: 187 - DNA, 2280 bp, Torque teno virus
  source 1..2280: mol_type = other DNA
atggcctactcctactggtggcgccgccggaggtggccgtggagaggccgatggaggcgctggaggcgccgcagacgaataccgcgccgaagacctagacgacctgttcgccgctatcgaaggagaccagtaaggagaaagcgtcggtgggggaggcgagggcgacggcgccggtacactagacggtacagacgcagactgactgtcagacgaaagagaaacaaactcagactgagcgtatggcagccccagaatatcagatactgtgccataaaaggcctctttcccatcctcatctgcgggcacggaaagagcgccggcaactatgccatccactcggatgactttatcacaagcagattctctttcggaggtggtctcagcacgacctcctactctctgaagctgctattcgaccaaaacctcaggggactaaacagatggaccgctagcaacgaccagctagacctagctaggtacctgggggccatattctggttctacagagaccagaaaacagactacatagtccagtatgacatctcagagcccttcaagatagacaaagacagctccccttccttccatccaggcatactgatgaaaagcaaacacaaagtactggtacccagcttccagacttggcccaagggtcgctctaaagtaaagctaaagataaagccccccaagatgttcgttgacaaatggtacacacaagaggatctctgtaccgttactcttgtgtcacttgtggtcagcctagcttcctttcaacatccgttctgccgaccactaactgacaacccttgcgtcaccttccaagttctgcaaaatttctacaacaacgtaataggctactcctcatcagacacactagtagataatgtctttacgagtctgttatactctaaagcctccttctggcagagccatctgaccccctcttatgtcaaaaaaattaacaacaaccccgatggcagctcaattagtcagcgagtaggcacaatgcctgacatgacggagtataacaagtgggtatccaacacaaatataggaacaggattcgtaaactcaaatgttagtgtacactataattattgtcagtacaaccctaaccatactcatttaacaacactgagacagtactacttcttttgggaaacacacccagcagcggccaacaaaacacctgtaacacacgtccccatcaccaccacaaaacccaccaaagactggtgggagtacagattaggcctgttcagtcccatcttcctatctccactcagaagcagcaacatagagtggcccttcgcatacagagacataatatacaacccactcatggacaagggggtaggtaacatgatgtggtaccagtacaacacaaaaccagatacccagttctcccccacctcttgcagagcagtgctagaagacaaacccatatggtccatggcatatgggtatgcagactttctgctgtccatactaggtgaacacgacgatgtagacttccatggattagtctgtatcatatgcccctacaccagaccgcccctcttcgacaaggataaccccaagatgggctatgtcttctacgatgctaaatttggcaatggcaaatggatagacggtacgggattcatcccggtagagttccagagtagatggaaaccagagctggccttccggaaagacgtactgactgacttagccatgtcaggccccttctcctacagcgacgaccttaaaaacaccacaatccaggccaagtacaaattcaaattcaaatggggcggtaatctctcttaccaccagacgatcagaaacccgtgcacctcggacggacagacgcccacaaccagtagacagtctagagaggtacaaatcgttgacccgctcaccatgggaccccgatacgtattccactcgtgggactggcgacgtgggtggcttaatgacagaactctcaaacgcttgttccaaaaaccgctcgattttgaagagtatccaaaatctccaaagagacctagaattttcccacccacagagcagctccaagaagacccgcaagagcaagaaagagactcctcttcttcggaagaaagtctccctacatcgtcagaagagacaccgccagcccacctactcagagtacacctcagaaagcagctccggcaacagcgagacctccgagtccagctcagagccctgttcgcccaagtcctcaaaacgcaagcgggcctacacataaaccccctcttattggccccgcagtaa

SEQ ID NO: 188 - DNA, 2220 bp, Torque teno virus
  source 1..2220: mol_type = other DNA
acggcctggtggtggggaagacggtggcgacgccgcccgtggggccgctggcgccgccgaaggcgcgtatggagaagaagacctagaactgctgttcgccgccgccgaggaagacgatatgtgagtagaaggcgccgctacaggcgcagactcagacgaaggggcagacggagatacagggggcgacgaaagaagagacagaccctagtactcaaacaatggcaacccgacgttaacagactgtgcagaatcacaggatggctacctcttatagtttgtggcaccggcagggcccaggacaactttatagtacactcagaggacataaccccccgaggagccgcctacgggggcaacctcacacacataacatggtgcttagaagctatataccaagaattcctcatgcacagaaacagatggtccagaagtaaccatgacctggacctctgcagataccaaggagtagtttttaaggcctatagacaccccaaagttgactacatactagcatacacaagaacacctccatttcaagcaacagaacttagctacatgtcctgccatccactactcatgctgacagcaaaacacaggatagtagtaaagagccaagagaccaaaaaagggggcaaaaaatatgtaaaatttagaataaagccccccagactaatgttaaacaagtggtacttcactcatgacttttgtaaagtcccactattcagcatgtgggcctcagcctgtgatctaagaaatccctggctaagagagggagccctaagccccacagtaggcttttttgccttaaagcctgacttctaccctaatttaagcattttaccaaatgaagtcagtcaacaattcgacttctttttaaactctgctcacccaccaagcatacaatcagaaaaagatgttagatgggaatatacatacacaaacttaatgaggcctatatacaaccagaccccatcactaaaggcctccacatatgactggcaaaactatagcaatccaaacaactatcaagcatgccaccaacaattcatagcatttaaagcacaaagatttgccaaaattaaagcagaatatcaaacagtatatcctacactaacaacacagacaccccaatcagaagcactaacacaagaatttggactatactctccatactatttaacaccaacaagaatcagcctagactggcacacagtattccaccacatcagatacaacccgatggcagacaaaggcctaggaaacatgatttgggtcgactggtgttccagaaaagaagccacctacgaccccacaagatccaagtgcatgctaaaagacctaccactatacatgcgcttctatggctactgtgactgggtaactaaatcaataggctcagaaacagcctggagagacatgagattaatggtggtctgcccttatacagaaccccaactaatgaaaaaaaatgacaaaacctggggctatgtaatctatggctacaactttgcaaacggaaacatgccgtggttacagccatatatcccaatctcgtggttttgccgttggttcccttgcatcactcaccaacgtgaagcaatggagtcagttgtggccacaggaccgttcatggtcagagaccaagaccgcaacagttgggacataactataggctacaaattcttatggagatgggggggctctcctctgcccactcaggcaatcgacgacccctgccagcagggaacccacccgcttcccgagcccggtacgttgcctagaatcttacaagtcagcgacccgacgcaactcggaccgaaaaccatattccacctctgggaccagaggcgtggactttttagcaaaagaagtattgaaagaatgtcagaatacaaaggaactgatgacttattttcaccaggtcgcccaaagcgcccaaagctcgacacacgtcccgaaggactaccagaggagcaaagaggagcttacaatttactccaagccctcgaagactcagcccagtcggaagaaagcgaccaagaagaaatgcctcccctcgaagaagaacaagtactccacgagcaaaagaaagaggcgctcctccagcagctccagcagcagaaacaccaccagcgagtcctcaagcgaggcctcagactcctcctcggagacgtcctgaaactccgccggggtctacacatagacccggtccttacatag

SEQ ID NO: 189 - DNA, 2043 bp, Torque teno virus
  source 1..2043: mol_type = other DNA
acggcgtggtggtggggacggtggcgccgccgctggcgccgcaggcgaccgtggagaccgagactacgacgaagaagagctagacgagcttttccgcgccgccgccgaagacgatttgtaagtaggagatggcgccggccttacaggcgcaggaggagacgcgggcgacgcagacgcagacgcagacgcagacataagcccaccctagtactcagacagtggcaacctgacgttatcagacactgtaagataacaggacggatgcccctcattatctgtggaaaggggtccacccagttcaactacatcacccacgcggacgacatcacccccaggggagcctcctacgggggcaacttcacaaacatgactttctccctggaggcaatatacgaacagtttctgtaccacagaaacaggtggtcagcctccaaccacgacctcgaactctgcagatacaagggtaccaccctaaaactgtacaggcacccagatgtagactacatagtcacctacagcagaacgggaccctttgagatcagccacatgacctacctcagcactcacccccttctcatgctgctaaacaaacaccacatagtggtgcccagcctaaagactaagcccaggggcagaaaggccataaaagtcagaataagaccccccaaactcatgaacaacaagtggtacttcaccagagacttctgtaacataggcctcttccagctctgggccacaggcttagaactcagaaacccctggctcagaatgagcaccctgagcccctgcataggcttcaatgtccttaaaaacagcatttacacaaacctcagcaacctacctcagcacagagaagacagacttaacattattaacaacacattacacccacatgacataacaggaccaaacaataaaaaatggcagtacacatataccaaactcatggcccccatttactattcagcaaacagggccagcacctatgacttactacgagagtatggcctctacagtccatactacctaaaccccacaaggataaaccttgactggatgaccccctacacacacgtcaggtacaatccactagtagacaagggcttcggaaacagaatatacatacagtggtgctcagaggcagatgtaagctacaacaggactaaatccaagtgtctcttacaagacatgcccctgtttttcatgtgctatggctacatagactgggcaattaaaaacacaggggtctcctcactagcgagagacgccagaatctgcatcaggtgtccctacacagagccacagctggtgggctccacagaagacatagggttcgtacccatcacagagaccttcatgaggggcgacatgccggtacttgcaccatacataccgttgagctggttttgcaagtggtatcccaacatagctcaccagaaggaagtacttgaggcaatcatttcctgcagccccttcatgccccgtgaccagggcatgaacggttgggatattacaataggttacaaaatggacttcttatggggcggttcccctctcccctcacagccaatcgacgacccctgccagcagggaacccacccgattcccgaccccgataagcaccctcgcctcctacaagtgtcgaacccgaaactgctcggaccgaggacagtgttccacaagtgggacatcagacgtgggcagtttagcaaaagaagtattaaaagagtgtcagaatactcatcggatgatgaatctcttgcgccaggtctcccatcaaagcgaaacaagctcgactcggccttcagaggagaaaacccagagcaaaaagaatgctattctctcctcaaagcactcgaggaagaagagaccccagaagaagaagaaccagcaccccaagaaaaagcccagaaagaggagctactccaccagctccagctccagagacgccaccagcgagtcctcagacgagggctcaagctcgtctttacagacatcctccgactccgccagggagtccactggaaccccgagctcacatag

SEQ ID NO: 190 - DNA, 2241 bp, Torque teno virus
  source 1..2241: mol_type = other DNA
acggcgtggtggagatacagacggagaccgtggagaagatggaggagacgccgctggggcctacgaacccgaagacctagaagaacttttcgccgccgccgagcaagacgatatgtgagtagagggcggcgccgccgatacaggcgcagacgcagacgggggcgacgcagacggggacgcagacgcaggcacagaaagactctcattgtcaggcaatggcaaccagacgttataaagagatgctttatcacagggtggctgcccctcattatctgtggaaacggacacacccaatttaactttataactcacatggatgacattccacccaagaatgcatcctacgggggcaacttcaccaacttgacctttaacctagcctgcttctatgacgaattcatgcaccacagaaacagatggtcagcctctaaccatgacctagagctagtgagatacatcagaaccagccttaaactctacagacacgagtcagtagactatatagtgtgctacaccaccacaggccccttcgagacaaatgaaatgtcctacatgctcactcaccctctggccatgctcctcagcaaaagacacgtagttgtgcctagcctaaaaacaaaaccacacggcagaaagtacaaaaagataacaattaagcccccaaaactgatgctaaacaagtggtactttgctacagacctctgccacataggcctcttccagctctgggccacaggcctagagcttagaaatccatggctcagatcaggcacaaacagccctgttataggcttctatgtccttaaaaaccaagtttacaaaaacagatacagcaacctaaacacaacagaagcacacaacgccagacaagacgcatggaacgaactaacccaaacaaaaactaacgacaaatggtacaattggcaatatacatacaataaacttatgaagccaatttactatgcagcttcaaatgaaagtagtaattcagccatgaaaggaaaaacatataattggaaacattacaaagaatattttagcaacacacaaactaagtggaaaacaattattaaagacgcctatgacttagtaagagaggaataccaacaattatacaccacaactatggcatatccaccaccatggcaatcaaccacttctaatacaggcagacaatacctagaacatgactgtggcatttacagcccatactttctaacaccacaaatatatagcccagaatggcacacagcctggtcctacatcagatacaatcccctcacagacaaaggcataggaaacagagtctgtgtccagtactgcagcgaggccagcagcgactacaacccaataaagagcaagtgtatgttacaagacatgcccttgtggatgatgctgtatggctacgcagactatgtagtaaagagcacaggcatacagtcagcctggacagacatgagagtggccatcagatgtccctacacagaccctaagcttgtgggcagcacagaaaacaccatgtttatccccataggcctagaattcatgaacggagacattccagacaaaaggccctacattccgttaacctggtggtttaagtggtaccccatgattacacaccagaaaaccgcaattgaggcaatagtttcctgcagccccttcatgcccagagatcaggaacaagctagttgggacataactgtaggttacaaagcaaccttcttatggggcgggtccccgttacctccacagcccattgacgacccctgccaaaaaggaaaacacgacattcccgaccccgatacaaaccctccaagaatacaaatatcagacccgcaacacctcggaccggcgacgctgttccactcgtgggacctcagacgtggatatattaatacaaaaagtattaaaagaatctcagaacacctcgatgctaatgaatatttttcgacaggcgtcgtgtccaaaaaaccccgattcgacactccccaccacgggcagctatcaaaccaagaagaagacgccttgtctatcctcagacaaccccaaaaagagcaagaagagaccacctccgaggaagaacaagcactccaaaaagaagaggagcaaaaagaaaagctcctacagcaactcagagtccagcgacagcaccagcgagtcctcagacagggaatcaaacacctcatgggagacgtcctccgactcagacagggagtccactggaacccagtcctataa

SEQ ID NO: 191 - DNA, 2217 bp, Torque teno virus
  source 1..2217: mol_type = other DNA
acggcctggggatggtaccggagaagaagatggcgcccatggagaaggagaaggtgggcgatacgcagaagaagacctagaagaactgttcgccgccgcggcagaagacgatatgtgagtagatggccgcgccgccgatacaggcgcagacgcagacgaaccagacgtagggggggacgcaaaaggagacacagacagactcttatactcagacagtggcaaccagatgttatgaaaaaatgttttattactggctggatgcccctcattatatgtggcactgggaacactcaatttaactttataacccatgaagacgatgtgccaccaaaaggagcctcctatggaggcaacctcactaacctcaccttcactctagaaggactgtatgacgaacacctactccacagaaacaggtggtccagatcaaactttgatctagacctcagcagatacctctacactataataaagctatacagacacgagtctgtagactacatagtcacctacaacagaacaggcccctttgaaataagcccactcagctacatgaacacacaccctatgctaatgctcctaaacaagcaccacgtagtggtgccaagcccaaaaacaaagcccaaaggcaagagggccattaaaattaaaataaagccacctaaactaatgctaaacaaatggtactttgcaagagacacgtgtagaataggcctctttcagctctatgccacaggggctaacctaacaaacccctggctcaggtcaggcacaaacagccctgtagtgggattctatgtaattaaaaactccatatatcaagacgcctttgataacctggcagacacagaacatacaaaccaaagaaaaaatgtatttgaaaacaaactatatcccactacaacaactaacaaagacaactggcaatacacatacacatccctcatgaaaaacatatactttaaaacaaaacaagaagcagaaaaccaaacaatgagtagcacatacaactttgacacatacaaaacaaactatgacaaagtaagaactaaatggataaaaatagctgaagatggctataaactagtatcaaaagaatacaaagaaatatacatcagtacagccacataccctccacaatggaattcaagaaactaccttagccatgactatggcatttatagtccttactttttaacaccccaaagatacagcccccaatggcacacagcatggacatatgtcagatacaacccactaacagacaaaggcataggcaacagaatatttgttcagtggtgctcagaaaaaaacagctcatacaacagcacaaaaagcaagtgcatgctacaagacatgcccctttttatgctaacctatgggtacctagactatgtactaaaatgcgcaggctctaaatcagcctggacagacatgagagtctgtatcagaagcccatacacagaaccacagcttacaggcaacacagatgatattagttttgttataatatcagaggccttcatgaacggggacatgccctacctagctccacacatacccgttagtctgtggtttaagtggtaccccatgatattacaccagaaggcagctttagaaaccatagtttcctgtggaccgtttatgcccagagaccaggaagccaactcttgggacataaccgcaggttacaaagcagtttttaagtggggtgggtcccctctgcctccacagcctatcgacgacccctaccaaaaacccacccacgaaatacccgaccccgataagcaccctccaagactacaaattgcagacccgaaaatcctcggaccgtcgacagtcttccacacatgggacatcagacgtggcctctttagcacagcaagtcttaagagagtgtcagaataccaaccgcctgatgaccttttttcaacaggcgtcgcatccaaaagaccccgattcgacactccagtccaagggcagctcgaaagccaagaagaagaaagctatcgtttactcagagcactccaaaaagagcaagagacaagcagctcggaagaggagcagccacaaaaccaagagatccaagaaaaactactcctccagctccagcagcagcgacaacagcagcgactcctcgcaaagggaatcaagcacctcctcggagatgtcctccgactccgaaaaggagtccactgggacccggtccttacatag

SEQ ID NO: 192 - DNA, 2217 bp, Torque teno virus
  source 1..2217: mol_type = other DNA
acggcgtggtacagaagaagaaggtggagaccgtggagaagacgccgcagaccgtggaccctacgcagaagaagagctagaagatttgttcgccgccgcccgagaagacgatatgtgagtagatggcggcgccgccgatacaggcgcagactaagacgggggagacgacgaaggggacgcagacgcagaaaagaaactataatagtgagacagtggcagccagatgtaatgagaaactgttatattactggcttcctacctctcatagtctgtggctcaggcaacactcaatttaactttatcacacatgagaatgacatacccccaaggggagcctcctatgggggcaacctcaccaacataaccttcaccctagcggcactatatgaccagtacttgctacacagaaacaggtggtccaggtcaaactttgacctagacctagccagatacattaacacaaaactaaaactatacagacatgactcagtagactacatagtaacctacaacagaacaggtccctttgaggtgaatccactaacatacatgcacactcaccccctactcatgctcgtgaacaggcaccacatagtggtgcccagtttaaaaacaaaacccagaggcaaaagatacataaaagtaaaaataaagcctccaaaactaatgctaaacaagtggtactttgcgaaagacatctgcccactaggcctcttccagctatatgctaccggcctagaactcagaaacccctggatcagagagggcacaaacagccccatagtagggttttatgttttaaaaccctcactatataatggagccatgtcaaacttagcagacacagaacatttaaaccaaagacaaaccctatttaacaaactacttccaacacaaaaccaaaaagacgaatggcaatacacatacaacaaaccaatgcaaaaaatatattatgaagcagcaaacaagcaagatagtggctttaaaaatacaacatataactggacaaactacaaaactaactaccaaaaagtacaatcacaatggcaaactgtagcacaacaaaactacaaccaagtatacaatgaatttaaagaggtatacccactaacagctacatggccaccgcaatggaatgctagacaatacatgtcacacgactttggcatatacagcccatactttttgtcacctgcaagatttacagactactggcacagtgcatacacctatgtcagatacaaccccatgtcagacaaaggcataggtaacataatctgcatacaatggtgcagtgaaaaaaacagtgaatttaatgagactaaaaacaagtgcatactaagagacatgccactttacatgctaacatatggctacctagactataccacaaaatgcacaggctccaactccatctggacagacgccagagtagccatcagatgtccatacacagatcccccactatcaaatccaactaacaaaaacacactttatattccactatctacatctttcatgcaaggagacatgccctggccaaccacaaacattccgttaaagatgtggtttaagtggtatcccatgatcatgcaccagagggcctgtttagaaaccatagtttcctgtggaccgtttatgcccagagaccaaaccgcaagcagttgggacataactattgcatacagagccttttttaaatggggtggcaatcctctgcctccacagcccatcgacgacccctgccaaaaagacacccacgaaatacccgaccccgataaacaccctagaggaatacaaatatcagacccgaaggtactcggaccacccacagtcttccacacatgggacatcagacgtggactgtttagctcgacgagtcttaaaagagtgtcagaataccaaccgcctgatgaccctttttcaacaggcgtcgtcttcaaaagaccccgactggaaacccagtacaaaggaacccaagaaaccccagaagaagacgcctacactttactcaaagcactccaaaaagagcaagagagcagcagctcggaagaagaactcccacaagaagagcaagagatccaaaaaacacaactcctcaagcagctccaactccagcagcagcaacagcgaatcctcaagaggggaatcagacacctcttcggagacgtcctccgactcagaaaaggagtccactccaacccagacctattataa

SEQ ID NO: 193 - DNA, 2217 bp, Torque teno virus
  source 1..2217: mol_type = other DNA
acggcctggtaccggtacagaagaaggccatggcgccgaaggaggcgaccgaggtggggcctacgcagaagaagatttagaagatcttttcgcggccgcggaagaagacgatatgtgagtagatggtcgcgccgccgatacaggcgcagacggagaagggggcgacgtagacggggacgcagacgaagaaagagacagactcttataccgagacagtggcagccagatgttactaaaaagtgcttcattactggctggatgcccttaataatctgtgggactggacacacacaatttaactttataacccacgaagaggatatccccggtgcaggagcctcctatggaggaaaccttacaaacattaccattactctgggagggctatatgaacaatatatgcttcacagaaaccactggtccagaagcaactatgacctagagctggccagatacctaggcttcaccctaaaatgctacagacatgcaacagtagactatatacttacatacagcagaacaacaccctttgagaccaatgaactgagccacatgctaactcaccccttactaatgctactaaacaaacatcacagagtaatacccagcttaaaaacaaggccaaaaggaaaaaggtcagttagaatccacattaaacccccaaaactaatgataaacaaatggtactttgcaaaagacctctgtaacataggaccctgtcaaatatatgccacaggcctagaactctcaaacccctggctaagatcaggcacaaacagccctgtaataggcttttgggtacttaaaaatcacctatatgatggcaacctctcaaacatagcctcaggtgaacaattaacagccagacaaactctatttacaactaaattactcccaagtaataacaccaaagacgaatggcaatacgcctataccccactaatgaaaacattctacacacaagcagccaacacagcagcacataacataacagacaaaacatacaactggaaaaactacaaaactcactatgacaaagtacaacaaacatggacaacaaaagcacaatttaattatgacttagttaaagaagaatacaaaacggtatatccaaccacagctacattcccaccagagtggtcaaacagacaatatctagaacatgactatggcttattcagcccttattttctaacaccaaacagatacagcacagagtggcacatgccaattacctatgttagatacaacccactagcagacaaaggcataggcaacagaatatacatgcagtggtgctcagaaagcagcagcagctttgagcccaccaaaagcaagtgcatgctacaagacatgccactatacatgctcacatatggatacctagactatgttgttaaatgcacaggtgttaaatcagcctggacagacatgagagtggccattagaagcccctacacctttcctcaactaataggcagcacagataaagtgggcttcatccccctaggtgaaaaattcatgagcggagacacagaccccgttaaaaactttataccgttaaagtattggtacagatggtatccgtttgcggctaaccaaaagtcagttttagaaaccatagtttcctgtggccccttcatgcccagagatcaggaagcaggctcttgggacataactgtaggttacaaagcaacctttaaacgggggggctcccctctacctccacagcccatcgacgacccatgccaaaagcccacccacgaccttcccgaccccgatagacaccccccaagaatacaaatctcggacccggcaagactcggaccggagacgctcttccactcatgggacatcagacgtggatacattaacacaaaagctattaaaagaatctcagattacacagaatctaatgactatttttcaacaggcgtcgtgtcaaaaagaccccgattggaaacccagtaccacggccaacacgaaagccaagaagaagacgcctatcttttactcaaacaactccaggaagagcaagaaacgagcagttcggagggagaacaagcaccccaagaaaaaacactccaaaaagaaaagctcctcaagcagctgcagctccacaagcagcagcagcaactcctcagaaaaggaatcagacacctcctcggggacgtcctccgactcagacggggagtccactgggacccaggcctatag

SEQ ID NO: 194 - DNA, 2211 bp, Torque teno virus
  source 1..2211: mol_type = other DNA
acggcgtggtggtggggccgatggagacagcgccgctggggccgccgccgccgcagaccatggagggtacgacgaaggagacctagaagatcttttcgccgccgccgccgaggacgatatgtgagtaggcggaggcgccgccgctactacaggcgcagactaagacggggcagacgcagagggcgacgaaagagacacagaccgaccctaatactgaggcagtggcaacctgacgttgttaaacactgtaagataacaggatggatgcccctcattatctgtggctctggcagcacacagatgaactttataacccacatggacgatactcctcccatgggatacacctacgggggcaactttgtaaatgtgactttcagcttagaggccatctatgaacagttcctatatcacagaaacagatggtccagatctaaccatgacttagacctagccaggtaccaaggaaccaccttaaaactctacagacacgccacagtagactacatactttcctacaacaggacaggacccttccagatcagtgagatgacatacatgagcactcacccagcaataatgctactaatgaaacacagaatagttgtgcccagccttagaacaaagcctaaaggcaggcgctccataaaaattagaataaagccccccaaacttatgctaaacaagtggtactttaccaaagacatatgctccatgggcctcttccaactaatggccaccggagcagaactcactaacccctggctcagagacaccacaaaaagcccagtaataggcttcagagttctaaaaaacagtgtttacaccaacttatctaacctaaaagacgtatccatatcaggagaaagaaaatccatcttaaacaaaattcacccagaaactctcacaggatcaggcaatgcatctaaagggtgggaatactcatacacaaaactaatggcgcccatatactattcagcagttagaaacagcacatacaactggcaaaactaccaaacacactgcgcaacaacagctatcaaatttaaagaaaaacaaaccagtactctaactcttattaaagcagagtacttataccactacccaaacaatgtcacacaggtagacttcatagatgaccccacactcacacatgactttggcatatacagcccatactggataacacctaccagaataagcctagactgggacacaccatggacatatgtcagatacaacccactctcagacaaaggcataggcaacagaatctatgcacagtggtgctcagaaaaaagcagcaaattagacaccacaaagagcaaatgcatactaaaagactttccactatggtgcatggcctatggctactgtgactgggtagtaaaatgtacaggagtgtccagtgcatggacagacatgagagtagccatcatctgcccgtacacagaaccggcacttatagggtcagatgaaaatgtaggctttattccagtaagtgacaccttttgcaacggagacatgccgtttcttgcaccatacatccctattacatggtggatcaagtggtaccccatgattacacaccaaaaggaagttcttgaggcaatagtaaactgtggaccgtttgtcccccgagaccaaagttccccagcttgggaaatcaccatgggttacaaaatggattggaaatggggcggctctcccctgccttcacaggcaatcgacgacccctgccagaagcccacccatgagctacccgatcccgatagacaccctcgcatgttacaagtctctgacccgacaaagctcggaccgaagacagtgttccacaaatgggactggagacgtgggcaacttagcaaaagaagtattaaaagagtccaagaagactcaacggatgatgaatatgttacagggcctttatcaagaaaaagaaacaagctcgacacaaagatgccaggccccccaacccccgaaaaagaaagctacactttactccaagccctccaagagtcgggccaggagagcagctcccaggacgaagaacaagcaccccaaaaagaagagaaccagaaagaagcgctcgtggagcagctccagctccagaaacagcaccagcgagtcctcaagcgaggcctcaaactcctcttgggagacgtcctccgactccgccgcggagtccactgggaccccctcctatcctaa

SEQ ID NO: 195 - DNA, 2232 bp, Torque teno virus
  source 1..2232: mol_type = other DNA
atggcatggggatggtggaaacgaaagcggcgctggtggtggagaaagcggtggacccgtggccgacttcgcagacgatggcctagacgatctcgtcgccgccctcgacgaagaagagtaaggaggcggaggaggtggaggagagggcgaccgagacgcagactgtacagacgcgggagacggtacagacgaaaacggaagagggctaagataactataagacaatggcagccagccatgacgagacgctgttttataaggggacacatgcccgctttaatatgtggctggggggcgtacgccagcaactacaccagccacctggaggacaaaatagttaaaggaccctacggagggggacacgccacttttagattctccctacaagtactgtgcgaggagcatctaaaacaccacaattactggactagaagtaaccaagacctagaactagctctgtactacggagccactattaaattttacagaagcccagacacagactttatagtaacataccagagaaaatccccccttggaggcaacatactaacagctccttcactacacccagcagaggccatgctaagcaaaaacaaaatactaataccgagcttacaaacaaaacccaaaggaaaaaagactgtaaaagttaacataccaccccccaccctttttgtacataagtggtactttcagaaggacatatgtgacctaacactgtttaacttgaacgttgttgcggctgacttgcggtttccgttctgctcaccacaaactgacaacgtttgcatcaccttccaggtactagccgcagagtacaacaacttcctctctacaactttaggcactacaaatgaatccacttttatagaaaactttttaaaagttgcatttccagatgacaaacctaggcattcaaacattttaaacacatttagaacagaaggatgcatgtctcacccccaactacaaaaatttaaaccaccaaacacaggaccaggcgaaaacaaatacttttttacaccagacggactatggggagaccccatatacatatacaataacggagtacaacaacaaactgcacaacaaattagagaaaaaattaaaaaaaacatggaaaattactatgccaaaatagtagaagaaaacacaataataacaaaaggatcaaaagcacactgccatctaacaggcatattttcaccaccattcttaaacataggtagagtagccagagaatttccaggactatacacagacgttgtctataatccatggacagataaaggcaaaggaaacaaaatatggttagacagcctaacaaaaagcgacaatatatatgacccaagacaaagcattctactaatggcagacatgccactatacataatgttaaatggatatatagactgggcaaaaaaagaaagaaacaactggggcttagctacacaatacagactactactaacatgtccctacacattcccaagactatacgtagaaacaaacccaaactatggatatgtaccatattcagaatcatttggagcaggccaaatgccagacaaaaacccctacgtaccaattacatggagaggcaaatggtaccctcacatacttcatcaagaggcagttataaatgacatagtaatatcaggcccattcacaccaaaagacacaaaaccagtaatgcaattaaacatgaaatactcgtttagattcacatggggcggcaatcctatttccacacagattgttaaagacccctgcacccagcccacctttgaaatacccggtggcggtaacatccctcgcagaatacaagtcatcaatccgaaagtcctcggacccagctacagtttcagatcctttgacctcagacgtgacatgtttagcggctcgagtcttaaaagagtctcagaacaacaagagacttctgagtttttattctccggcggcaaacgccccaggatcgaccttcccaagtacgtcccgccagaagaagacttcaatatccaagagagacaacaaagagaacagagaccgtggacgagcgaaagcgagagcgaagcagaagcccaagaagagacgcaggcgggctcggtccgagagcagctccagcagcagctccaagagcagtttcaactccgaagagggctcaagtgcctcttcgagcagttagtcagaacccaacagggagtccacgtagatccctgcctcgtgtag

SEQ ID NO: 196 - DNA, 2181 bp, Torque teno virus
  source 1..2181: mol_type = other DNA
atggcatggggatggtggaagcgacggcggcgctggtggttccggaagcggtggacccgtggcagacttcgcagacgatggcctcgatcagctcgtcgccgccctagacgacgaagagtaaggagacgcagacgatggaggagggggcgacctagacgcagactgtaccgacgctacagacgcaaaaaacgtaggagacgaaagcccaaaacagttttaaaacaatggcagccagacattacaaagaggtgctacataataggctacattcctgccataatatgcggggcgggcacctggtctcacaactacaccagccacctgctagatattatccccaagggaccgtttggagggggacacagcaccatgagattctccctaaaagtgctcttcgaagagcacctgagacacctaaacttttggacacgtagtaaccaggatttagaacttgtaagatactttagatgctcctttaggttctacagagaccaacacacagactatcttgtacactacagcagaaaaacacccctgggaggcaacagactgacagcacctagccttcacccaggggtacagatgctaagcaaaaacaaaataatagtacccagctatgatactaaacctaagggcaaaagctatgtaaaagtaactatagcaccccccactctactaactgacaagtggtactttagcaaagacatttgtgacacaaccttggttaacttagacgttgtactctgcaacttgcggtttccgttctgctcaccacaaactgacaacccttgcatcacgttttccgttcttcactccatctacaacgacttcctctctatagtagatactggaaactataaaacacaatttgtgtcaaacttatctacaaaagtaggtactgactggggaaaaagactaaacacatttagaacagaaggctgctactctcaccctaaattacccaaaaaggcagtaacacctggaaatgacaaaacatactttactgtacccgatggcttatggggagacgctgtatttaatgcagaggcaagcaatataattactaaaaacatggagtcatacagcgagtctgcaaaagccagaggagtgcaaggagaccctgcattttgccaccttacaggcatatactcacctccctggctaacaccaggtagaatatccccggagactccaggactttacacagacgtgacttacaacccatacgcagacaaaggagtgggtaacagaatatgggttgactactgcagtaaaaaaggcaataaatatgacaatacaagtaaatgccttttagaagacatgccactatggatggtcacctttggctatgtagactgggtaaaaaaagaaactggcaactggggtattccactgtgggccagagtactgataagatgcccttacacagtaccaaaactttacaatgaagcagacccaaactacggatgggtcccttactcctactactttggagaaggaaaaatgccaaacggagacctgtacgtaccctttaaaattagaatgaagtggtacccgtccatgtggaaccaagaaccagtactaaatgacttagcaaagagcggaccgtttgcatacaaagacacaaaaaccagtgtgactgtgactgctaaatacaaatttacatttaacttcgggggcaaccccgtaccctcacagattgtacaagatccctgcacacagtccacctatgacatccccggcaccggtaacttgcctcgcagaatacaagtcattgacccgaaagtcctcggtccccactactcattccaccgctgggacttcaggcgtggcctctttggccaacaagctattaagagagtgtcagaacaaccaacaacttctgagtttttattctcaggtccaaagagacccagaatcgatcaagggccttacatcccgccagaaaaaggctcagattcactccaaagagaatcgagaccgtggagcaactcggagaccgaggcagagacagaagccccctcggaagaagagccggagaaccaagaagaacaagtactccagttgcagctccgacagcagctccgagaacagcgaaaactcagacagggaatccagtgcctcttcgagcaactgataacaacccaacagggggttcacaaaaacccattgctagagtag

SEQ ID NO: 197 - DNA, 2244 bp, Torque teno virus
  source 1..2244: mol_type = other DNA
atggcgtggtcgtggtggtggaggcgacggaaacgctggtggccgcgcagaaggaggcgatggaggagatttcgcacccgaagagctagacgagctgttccgcgccgtcgccgccgacgaagagtaaggaggcgccggtgggggaggcgaagacgtaggagacgggttttttataagagacgcagacgaaagactggcagactgtacagaaagcccaaaaagaaactagtactgactcagtggcaccccactaccgtccgcaactgctccatccgaggccttgtgcctctagtactctgcggacacactcagggcggcagaaactttgctctcaggagcgatgactaccccaagcaggggtctccttacggaggcagttttagcactacaacctggaacttgagggtcctttttgacgaacaccaaaaacaccacaacacgtggagctaccccaataaccagctagacctgggcagatacaagggctgcaccttctacttttacagagacaaaaagacagactacatagtaaagtttcagaggaggggaccctttaaaataaacaagtacagcagtcccatggcccatccgggcatgatgatgctagataagatgaaaatcctggtgcccagctttgataccaggcccgggggtcgcagaagagtaaaagtaactatccgcccccccactctgttagaggacaagtggtacacccagcaagacctggcgcccgttaatcttgtgtcacttgtggtttctgcggctagcttcatacatccgtttagccaaccacaaacgaacaacatttgcacaaccttccaggtgttgaaagacatgtactatgactgcataggaattaattccactttaacaaccaagtatgaaaacttatttaataaactatattccaaatgctgctactttgaaacctttcaaacaatagcccagctaaatcctggctttaaagctgctaaaaagactactaatggttctggttctacagctgcaacactaggagacgcagtaactgaacttaaaaacccaaatggtactttttacacaggcaacaatagcacctttggctgctgcacatataaacccactaaagaaataggtagtaatgccaataagtggttctggcatcagttaacagccacagattcagacacactaggccaatacggccgtgcctccattaagtatatggagtaccacacaggcatttacagctcaatttttcttagcccactaagaagcaatctagaattccctacagcataccaagatgtaacatataatccactaactgacagaggtataggtaacagaatctggtaccagtacagtaccaaagaaaacactacatttaatgaaacacagtgcaaatgtgtactatcagacttgccactgtggagcatgttttatggctatgtagattttatagagtcagaactaggcatctcagcagagatacacaactttggcatagtatgtgtccagtgcccctacacgtttcccccaatgtttgacaaatccaaaccagataaaggctacgtgttctatgacaccctttttggcaacggaaagatgccagacgggagcggacacgtacccacctactggcagcagaggtggtggcccagattcagcttccagagacaagtgatgcacgacattatcctcaccgggcccttcagctacaaagatgactctgtaatgactggcataaccgcaggctacaagtttaaattctcatggggcggtgatatggtctccgaacaggtcattaaaaacccagagagaggggacggacgagactccacctatcccgatagacagcgccgcgacttacaagttgttgacccacgctccatgggcccccaatgggtattccacacctttgactacagacgggggctttttggaaaggacgctattaagcgagtgtcagaaaaaccgacagatcctgactactttacaacaccttacaaaaaaccaagatttttccctccaacagcaggagaagaaaaactgcaagaagaagactccgctttacaggagaaaagaagcccgctctcgtcagaagaggggcagacgagggcgcaagtcctccagcagcaggtcctccagtcggagctccagcagcagcaggagctcggggagcagctcagattcctcctcagggaaatgttcaaaacccaagcgggcatacacatgaacccccgcgcatttcaggagctgtaa

SEQ ID NO: 198 - DNA, 2244 bp, Torque teno virus; identical to SEQ ID NO: 197
  source 1..2244: mol_type = other DNA

SEQ ID NO: 199 - DNA, 2238 bp, Torque teno virus
  source 1..2238: mol_type = other DNA
atggcatggggatggtggagatggcggcgccgctggcccgccagacgctggaggagacgccgtcgccggcgccccgtacggagaacaagagctcgccgacctgctcgacgctatagaagacgacgaacagtaagaaccaggcggaggcggtgggggcgcagacggtacagacggggctggagacgcaggacttatgtgaggaaggggcgacacagaaaaaagaaaaagagactcatactgagacagtggcagcccgccaccagacgcagatgcaccataacagggtacctgcccatagtgttctgcggccacactaagggcaataaaaactacgccctacactctgacgactacaccccccaaggacagccatttggaggggctctaagcactacctcattctctttaaaagtactgtttgaccagcatcagagaggactgaataagtggtcgttccccaacgaccaactagacctggccagatacaggggctgcaaattctacttttacaggacaaaacagactgactggataggccagtatgatatatcagagccctacaagctagacaagtacagctgccccaactaccacccgggaaacatgattaaagcaaagcacaaatttttaattcccagctatgacactaatcccaggggcagacaaaaaattatagttaaaattccccccccagacctctttgtagacaagtggtacactcaggaagacctgtgttccgttaatcttgtgtcacttgcggtttctgcggcttcctttctccacccattcggctcaccacaaactgacaacccttgctacaccttccaggtgttgaaagagttctactaccaggcaataggcttctcagcaacagatcaacaaagagaaaaagtttttgatatattatacaaaaacaactcatactgggaatcaaacataactcccttttatgtaattaatgttaaaaaagggtctaacacaacacagtacatgtcacctcaaatttcagactcatcttttagaaagaaagtaaatactaactacaactggtatacctacgatgccaaaactaatgcatcacaattaaagcaactaagaaatgcatactttaaacaattaacctctgaaggcccacaacacacatactctgacaatggctacgccagtcagtggaccacccccagcacagacgcctacgaataccacttaggcatgtttagtactatatttttagccccagacagaccagtacctcgctttccctgcgcttaccaagatgttacttacaacccactaatggacaaaggagtgggcaaccatgtatggtttcaatacaacacaaaggcagacacacagctaatagttacaggagggtcctgcaaagcacacatacaagacatacccctatgggcagccttctatggatacagtgactttatagagtcagagctaggcccctttgtagacgcagacacagtaggccttatctgtgtaatatgcccttacactaaacctcccatgtacaacaagacaaatcccatgatggggtacgtgttttatgacagaaactttggtgacggcaaatggactgacggacggggcaaaatagagccctactggcaagttaggtggaggcccgaaatgcttttccaagaaactgtaatggcagacatagtacagacagggccctttagctacaaagatgaacttaaaaacagcacactagtatgcaagtacaaattctattttacctggggaggtaacatgatgttccaacagacgatcaaaaacccgtgcaagacggacggacaacccaccgactccagtagacaccctagaggaatacaagtggcggacccggaacaaatgggaccccgctgggtgttccactcctttgactggcgaaggggctatcttagcgagaaagctctcaaacgcctgcaagaaaaacctcttgactatgacgaatattttacacaaccaaaaagacctagaatctttcctccaacagaatcagcagagggagagttccgagagcccgaaaaaggctcgtattcagaggaagaaaggtcgcaagcctctgccgaagagcagacggaggaggcgacagtactcctcctcaagcgacgactcagagagcaacagcagctccagcagcagctccaattcctcacccgagaaatgttcaaaacgcaagcgggtctccacataaaccctatgttattaaaccagcgataa

SEQ ID NO: 200 - DNA, 2238 bp, Torque teno virus
  source 1..2238: mol_type = other DNA
atggcatggggatggtggagatggcggcgccgctggcccgccagacgctggaggagacgccgtcgccggcgccccgtacggagaacaagagctcgccgacctgctcgacgctatagaagacgacgaacagtaagaaccaggcggaggcggtgggggcgcagacggtacagacggggctggagacgcaggacttatgtaaggaaggggcgacacagaaaaaagaaaaagagactgatactgagacagtggcagcccgccaccagacgcagatgcaccataacagggtacctgcccatagtgttctgcggccacactaagggcaataaaaactacgccctacactctgacgactacaccccccaaggacagccatttggaggggctctaagcactacctcattctctttaaaagtactgtttgaccagcatcagagaggactgaataagtggtcgttccccaacgaccaactagacctggccagatacaggggctgcaaattctacttttacaggacaaaacagactgactggataggccagtatgatatatcagagccctacaagctagacaagtacagctgccccaactaccacccgggaaacatgattaaagcaaagcacaaatttttaattcccagctatgacactaatcccaggggcagacaaaaaattatagttaaaattccccccccagacctctttgtagacaagtggtacactcaggaagacctctgttccgttaatcttgtgtcacttgcggtttctgcggcttcctttctccacccattcggctcaccacaaactgacaacccttgctacaccttccaggtgttgaaagagttctactaccaggcaataggcttctcagcaacagatgaacaaagagaaaaagtttttgatatattatacaaaaacaactcatactgggaatcaaacataactcccttttatgtaattaatgttaaaaaagggtgtaacacaacacagtacatgtcacctcaaatttcagactcatcttttagaaagaaagtaaatactaactacaactggtatacctacgatgccaaaactaatgcatcacaattaaagcaactaagaaatgcatactttaaacaattaacctctgaaggcccacaacacacatactctgacaatggctacgccagtcagtggaccacccccagcacagacgcctacgaataccacttaggcatgtttagtactatatttttagccccagacagaccagtacctcgctttccctgcgcttaccaagatgttacttacaacccactaatggacaaaggagtgggcaaccatgtatggtttcagtacaacacaaaggcagacacacagctaatagttacaggagggtcctgcaaagcacacatacaagacatacccctatgggcagccttctatggatacagtgactttatagagtcagagctaggcccctttgtagacgcagacacagtaggccttatctgtgtaatatgcccttacactaaaccccccatgtacaacaagacaaatcccatgatggggtacgtgttttatgacagaaactttggtgacggcaaatggactgacggacggggcaaaatagagccctactggcaagttaggtggaggcccgaaatgcttttccaagaaactgtaatggcagacatagtacagacagggccctttagctacaaagatgaacttaaaaacagcacactagtatgcaagtacaaattctattttacctggggaggtaacatgatgttccaacagacgatcaaaaacccgtgcaagacggacggacaacccaccgactccagtagacaccctagaggaatacaagtggcggacccggaacaaatgggaccccgctgggtgttccactcctttgactggcgaaggggctatcttagcgagaaagctctcaaacgcctgcaagaaaaacctcttgactatgaccaatattttacacaaccaaaaagacctagaatctttcctccaacagaatcagcagagggagagttccgagagcccgaaaaaggctcgtattcagaggaagaaaggttgcaagcctctgccgaagagcagacggaggaggcgacagtactcctcctcaagcgacgactcagagagcaacagcagctccagcagcagctccaattcctcacccgagaaatgttcaaaacgcaagcgggtctccacataaaccctatgttattaaaccagcgataa

SEQ ID NO: 201 - DNA, 2238 bp, Torque teno virus
  source 1..2238: mol_type = other DNA
atggcatggggatggtggagatggcggcgccgctggcccgccagacgctggaggagacgccgtcgccggcgccccgtacggagaacaagagctcgccgacctgctcgacgctatagaagacgacgaacagtaagaaccaggcggaggcggtgggggcgcagacggtacagacggggctggagacgcaggacttatgtaaggaaggggcgacacagaaaaaagaaaaagagactgatactgagacagtggcagcccgccaccagacgcagatgcaccataacagggtacctgcccatagtgttctgcggccacactaagggcaataaaaactacgccctacactctgacgactacaccccccaaggacagccatttggaggggctctaagcactacctcattctctttaaaagtactgtttgaccagcatcagagaggactgaataagtggtcgttccccaacgaccaactagacctggccagatacaggggctgcaaattctacttttacaggacaaaacagactgactggataggccagtatgatatatcagagccctacaagctagacaagtacagctgccccaactaccacccgggaaacatgattaaagcaaagcacaaatttttaattcccagctatgacactaatcccaggggcagacaaaaaattatagttaaaattccccccccagacctctttgtagacaagtggtacactcaggaagacctgtgttccgttaatcttgtgtcacttgcggtttctgcggcttcctttctccacccattcggctcaccacaaactgacaacccttgctacaccttccaggtgttgaaagagttctactaccaggcaataggcttctcagcaacagatgaacaaagagaaaaagtttttgatatattatacaaaaacaactcatactgggaatcaaacataactcccttttatgtaattaatgttaaaaaagggtgtaacacaacacagtgcatgtcacctcaaatttcagactcatcttttagaaagaaagtaaatactaactacaactggtatacctacgatgccaaaactaatgcatcacaattaaagcaactaagaaatgcatactttaaacaattaacctctgaaggcccacaacacacatactctgacaatggctacgccagtcagtggaccacccccagcacagacgcctacgaataccacttaggcatgtttagtactatatttttagccccagacagaccagtacctcgctttccctgcgcgtaccaagatgttacttacaacccactaatggacaaaggagtgggcaaccatgtatggtttcagtacaacacaaaggcagacacacagctaatagttacaggagggtcctgcaaagcacacatacaagacatacccctatgggcagccttctatggatacagtgactttatagagtcagagctaggcccctttgtagacgcagacacagtaggccttatctgtgtaatatgcccttacactaaaccccccatgtacaacaagacaaatcccatgatggggtacgtgttttatgacagaaactttggtgacggcaaatggactgacggacggggcaaaatagagccctactggcaagttaggtggaggcccgaaatgcttttccaagaaactgtaatggcagacatagtacagacagggccctttagctacaaagatgaacttaaaaacagcacactagtatgcaagtacaaattctattttacctggggaggtaacatgatgttccaacagacgatcaaaaacccgtgcaagacggacggacaacccaccgactccagtagacaccctagaggaatacaagtggcggacccggagcaaatgggaccccgctgggtgttccactcctttgactggcgaaggggctatcttagcgagaaagctctcaaacgcctgcaagaaaaacctcttgactatgaccaatattttacacaaccaaaaagacctagaatctttcctccaacagaatcagcagagggagagttccgagagcccgaaaaaggctcgtattcagaggaagaaaggtcgcaagcctctgccgaagagcggacggaggaggcgacagtactcctcctcaagcgacgactcagagagcaacagcagctccagcagcagctccaattcctcacccgagaaatgttcaaaacgcaagcgggtctccacataaaccctatgttattaaaccagcgataa

SEQ ID NO: 202 - DNA, 2181 bp, Torque teno virus
  source 1..2181: mol_type = other DNA
atggcatggagatggtggaagcgacggaggcgctggtggttccgcaagcggtggacccgtggcagacttcgcagacgatggcctcgaccagctcgtcgccgacctagacgacgaagagtaaggagacgcagacgttggaggagggggcgacccagacgtagactgtaccgacgctacagacgcaaaaaacgtaggagacgaaagcccaaaataatcttaaaacaatggcagccagacattgtaaagaggtgctacatagtgggctacattcctgccataatatgtggggcgggcacctggtctcacaactacaccagccaccttctagacattatccccaagggaccctttggaggagggcacagcactatgaggttctccctaaaagtactctctgaagaacacctcagacacttaaacttttggacaaagagtaaccaggacctagaactgataagatactttagatgctcctttaaattttatagagaccaagacacagactacatagtacactacagcagaaaaactcccctgggaggcaacagactgacagcacctaacctgcacccaggggtacaaatgcttagcaaaaacaaaataatagtacctagctatgctacaaaacccaagggtcctagctatataaaagtaaccatagcaccccccacactgctaactgacaagtggtactttagcaaagacgtttgtgacacaaccttggttaacttagacgttgtactctgcaacctgcggtttccgttctgctcaccacaaactgacaacccttgcatcacattccaagttctgcattccatctacaacgacttcctctctatagtagatactaacaactataaagaatcttttgttagtgcattaccaacaaaagtatctactgactggggcaaaagactaaacacctttagaacagaaggatgctattcacaccccaaattacataaaaaagctgtaacagctgctacagatacagaatactttacaaagccagatggtctgtggggagacactatatttgatgtagaaaatggacaaaaaattataaaaaatatggagtcatatgctaagtcagccaaagaaagagggatcaatggagaccctgctttctgtcacttaacaggaatatactcacctccctggttaacaccagggagaatatctccagaaacacctggactttacacagacgtgacttacaacccttacgctgacaaaggagtgggcaacagaatatgggttgactactgcagtaaaaaaggcaacaaatatgacaatacaagtaaatgccttttagaagacatgccactatggatggtatgctttggctatgtagactgtgtaaaaaaagaaaccggcaactggggcattccactatgggctagagtacttataagaagcccatatactgttcccaaactatataatgaagcagacccaaactatggatgggtacctattttttactattttggagaaggcaaaatgccaaacggagacatgtacataccatttaaaataagaatgaaatggtacccttcaatgtggaaccaagagccagtattaaatgacttagcaaagagcggaccgtttgcatacaaaaacaccaaaacaagtgtgactgtgactgccaaatataaattcacatttaacttcggtggcaaccccgtaccctcacagattgtacaagatccctgcacacagcccacctacgacatccccggcaccggtaacctgcctcgcagaatacaagtcattgacccgaaagtcctcagtccccactattccttccaccggtgggacttcagacgtggcctgtttggctcacaagctattaagagagtgtcagaacaatcaacaacttctgagtttttattctcaggcccaaagaaacccagaatcgatcaaggtccttacatcccgccagaaaaaggctcaggttcactccaaagagaaccgagaccgtggagcagctcggagaccgaggcagagacagaagccccctcggaagaagagccggagaaccaagaagaacaagtactccagttgcagctcagacagcagctccgagaacagcgaaaactcagacagggaatccagtgcctattcgagcaactaataacaactcagcagggggtccacaaaaacccattgttagagtag

SEQ ID NO: 203 - DNA, 2181 bp, Torque teno virus
  source 1..2181: mol_type = other DNA
atggcatggagatggtggaagcgacggaggcgctggtggttccgcaagcggtggacccgtggcagacttcgcagacgatggcctcgaccagctcgtcgccgacctagacgacgaagagtaaggagacgcagacgttggaggagggggcgacccagacgtagactgtaccgacgctacagacgcaaaaaacataggagacgaaagcccaaaataatcttaaaacaatggcagccagacattgtaaagaggtgctacatagtgggctacattcctgccataatatgtggggcgggcacctggtctcacaactacaccagccaccttctagacattatccccaagggaccctttggaggagggcacagcactatgaggttctccctaaaagtactctttgaagaacacctcagacacttaaacttttggacaaagagtaaccaggacctagaactgataagatactttagatgctcctttaaattttatagagaccaagacacagactacatagtacactacagcagaaaaactcccctgggaggcaacagactgacagcacctaacctgcacccaggggtacaaatgcttagcaaaaacaaaataatggtacctagctatgctacaaaacccaagggtcctagctatataaaagtaaccatagcaccccccacactgctaactgacaagtggtactttagcaaagacgtttgtgacacaaccttggttaacttagacgttgtactctgcaacctgcggtttccgttctgctcaccacaaactgacaacccttgcatcacattccaagttctgcattccatctacaacgacttcctctctatagtagatactaacaactataaagaatcttttgttagtgcattaccaacaaaagtatctactgactggggcaaaagactaaacacctttagaacagaaggatgctattcacaccccaaattacataaaaaagctgtaacagctgctacagatacagaatactttacaaagccagatggtctgtggggagacactatatttgatgtagaaaatggacaaaaaattataaaaaatatggagtcatatgctaagtcagccaaagaaagagggatcaatggagaccctgctttctgtcacttaacaggaatatactcacctccctggttaacaccagggagaatatctccagaaacacctggactttacacagacgtgacttacaacccttacgctgacaaaggagtgggcaacagaatatgggttgactactgcagtaaaaaaggcaacaaatatgacaatacaagtaaatgccttttagaagacatgccactatggatggtatgctttggctatgtagactgggtaaaaaaagaaaccggcaactggggcattccactatgggctagagtacttataagaagcccatatactgttcccaaactatataatgaagcagacccaaactatggatgggtacctatttcttactattttggagaaggcaaaatgccaaacggagacatgtacataccatttaaaataagaatgaagtggtacccttcaatgtggaaccaagagccagtattaaatgacttagcaaagagcggaccgtttgcatacaaaaacaccaaaacaagtgtgactgtgactgccaaatataaattcacatttaacttcggtggcaaccccgtaccctcacagattgtacaagatccctgcacacagcccacctacgacatccccggcaccggtaacctgcctcgcagaatacaagtcattgacccgaaagtcctcggtccccactattccttccaccggtgggacttcagacgtggcctgtttggctcacaagctattaagagagtgtcagaacaatcaacaacttctgagtttttattctcaggcccaaagaaacccagaatcgatcaaggtccttacatcccgccagaaaaaggctcaggttcactccaaagagaaccgagaccgtggagcagctcggagaccgaggcagagacagaagccccctcggaagaagagccggagaaccaagaagaacaagtactccagttgcagctcagacagcagctccgagaacagcgaaaactcagacagggaatccagtgcctattcgagcaactaataacaactcagcagggggtccacaaaaacccattgttagagtag

SEQ ID NO: 204 - DNA, 2181 bp, Torque teno virus
  source 1..2181: mol_type = other DNA
atggcacggagatggtggaagcgacggaggcgctggtggttccgcaagcggtggacccgtggcagacttcgcagacgatggcctcgaccagctcgtcgccgacctaaacgacgaagagtaaggagacgcagacgttggaggagggggcgacccagacgtagactgtaccgacgctacagacgcaaaaaacgtaggagacgaaagcccaaaataatcttaaaacaatggcagccagacattgtaaagaggtgctacatagtggactacattcctgccataatatgtggggcgggcacctggtctcgcaactacaccagccaccttctagacattatccccaagggaccctttggaggagggcacagcactatgaggttctccctaaaagtactctttgaagaacacctcaggcacttaaacttttggacaaagagtaaccaggacctagaactgataagatactttagatgctcctttaaattttatagagaccaagacacagaccacatagtacactacagcagaaaaactcccctgggaggcaacagactgacagcacctaacctgcacccaggggtacaaatgcttagcaaaaacaaaataatagtacctagctatgctacaaaacccaagggtcctagctatataaaagtaaccatagcaccccccacactgctaactgacaagtggtactttagcaaagacgtttgtgacacaaccttggttaacttagacgttgtactctgcaacctgcggtttccgttctgctcaccacaaactgacaacccttgcatcacattccaagttctgcattccatctacaacgacttcctctctatagtagatactaacaactataaagaatcttttgttgctgcattaccaacaaaagtatctactgactggggcaaaagactaaacacctttagaacagagggatgctattcacaccccaaattacataaaaaagctgtaacagctgctacagatacagaatactttacaaagccagatggtctgtggggagacactatatttgatgtagaaaatggacaaaaaattataaaaaatatggaatcatatgctaagtcagccaaagaaagagggatcaatggagaccctgctttctgtcacttaacaggaatatactcacctccctggttaacaccagggagaatatctccagaaacacctggactttacacagacgtgacttacaacccttacgctgacaaaggagtgggcaacagaatatgggttgactactgcagtaaaaaaggcaacaaatatggcaatacaagtaaatgccttttagaagacatgccactatggatggtatgctttggctatgtagactgggtaaaaaaagaaaccggcaactggggcattccactatgggctagagtacttataagaagcccatatactgttcccaaactatataatgaagcagacccaaactatggatgggtacctatttcttactattttggagaaggcaaaatgccaaacggagacatgtacgtaccatttaaaataagaatgaaatggtacccttcaatgtggaaccaagagccagtattaaatgacttagcaaagagcggaccgtttgcatacaaaaacaccaaaacaagtgtgactgtgactgccaaatataaattcacatttaacttcgggggcaaccccgtaccctcacagattgtacaagatccctgcacacagcccacctacgacatccccggcaccggtaacctgcctcgcagaatacaagtcattgacccgaaagtcctcggtccccactattccttccaccggtgggacttcagacgtggcctgtttggctcacaagctattaagagagtgtcagaacaatcaacaacttctgagtttttattctcaggcccaaagaaacccagaatcgatcaaggtccttacatcccgccagaaaaaggctcaggttcactccaaagagaaccgagaccgtggagcagctcggagaccgaggcagagacagaagccccctcggaagaagagccggagaaccaagaagaacaagtactccagttgcagctcagacagcagctccgagaacagcgaaaactcagacagggaatccagtgcctattcgagcaactaataacaactcagcagggggtccacaaaaacccattgttagagtag

SEQ ID NO: 205 - DNA, 2181 bp, Torque teno virus
  source 1..2181: mol_type = other DNA
atggcatggagatggtggaagcgacggaggcgctggtggttccgcaagcggtggacccgtggcagacttcgcagacgatggcctcgaccagctcgtcgccgacctaaacgacgaagagtaaggagacgcagacgttggaggagggagcgacccagacgtagactgtaccgacgctacagacgcaaaaaacgtaggagacgaaagcccaaaataatcttaaaacaatggcagccagacattgtaaagaggtgctacatagtgggctacattcctgccataatatgtggggcgggcacctggtctcacaactacaccagccaccttctagacattatccccaagggaccctttggaggagggcacagcactatgaggttctccctaaaagtactctttgaagaacacctcaggcacttaaacttttggacaaagagtaaccaggacctagaactgataagatactttagatgctcctttaaattttatagagaccaagacacagactacatagtacactacagcagaaaaactcccctgggaggcaacagactgacagcacctaacctgcacccaggggtacaaatgcttagcaaaaacaaaataatagtacctagctatgctacaaaacccaagggtcctagctatataaaagtaaccatagcaccccccacactgctaactgacaagtggtactttagcaaagacgtttgtgacacaaccttggttaacttagacgttgtactctgcaagctgcggtttccgttctgctcaccacaaactgacaacccttgcatcacattccaagttctgcattccatctacaacgacttcctctctatagtagatactaacaactataaagaatcttttgttgctgcattaccaacaaaagtatctactgactggggcaaaagactaaacacctttagaacagaaggatgctattcacaccccaaattacataaaaaagctgtaacagctgctacagatacagaatactttacaaagccagatggtctgtggggagacactatatttgatgtagaaaatggacaaaaaattataaaaaatatggaatcatatgctaagtcagccaaagaaagagggatcaatggagaccctgctttctgtcacttaacaggaatatactcacctccctggttaacaccagggagaatatctccagaaacacctggactttacacagacgtgacttacaacccttacgctgacaaaggagtgggcgacagaatatgggttgactactgcagtaaaaaaggcaacaaatatgacaatacaagtaaatgccttttagaagacatgccactatggatggtatgctttggctatgtagactgggtaaaaaaagaaaccggcaactggggcattccactatgggctagagtacttataagaagcccatatactgttcccaaactatataatgaagcagacccaaactatggatgggtacctatttcttactattttggagaaggcaaaatgccaaacggagacatgtacgtaccatttaaaataagaatgaaatggtacccttcaatgtggaaccaagagccagtattaaatgacttagcaaagagcggaccgtttgcatacaaaaacaccaaaacaagtgtgactgtgactgccaaatataaattcacatttaacttcgggggcaaccccgtaccctcacagattgtacaaaatccctgcacacagcccacctacgacatccccggcaccggtaacctgcctcgcagaacacaagtcattgacccgaaagtcctcggtccccactattccttccaccggtgggacttcaggcgcggcctgtttggctcacaagctattaagagagtgtcagaacaatcaacaacttctgagtttttattctcaggcccaaagaaacccagaatcgatcaaggtccttacatcccgccagaaaaaggctcaggttcactccaaagagaaccgagaccgtggagcagctcggagaccgaggcagagacagaagccccctcggaagaagagccggagaaccaagaagaacaagtactccagttgcagctcagacagcagctccgagaacagcgaaaactcagacagggaatccagtgcctattcgagcaactaataacaactcagcagggggtccacaaaaacccattgttagagtag

SEQ ID NO: 206 - DNA, 2232 bp, Torque teno virus
  source 1..2232: mol_type = other DNA
atggcctggggatggtggaaacgcagacggcgccgatggtggagaggcctctggaggagacgccgctttgccagaagacgacctagacggcctgctcgccgccctagacgacgaagagtaaggagacgcagacggtggaggagggggcgactaaggaggcgcgtgtacaacaggagacgcaggatcagacgaaagagacgcagacagaaactgacaataagacagtggcagcctgacaaacgcaggatatgtagaattaaaggctaccttcctgccattatatatggagacgggacgttttctaaaaactatacaagtcacttagaggacagaatctccaaaggaccgtttgggggagggcacgggactgctagaatgtctcttaaagtactgtatgacgaccacctaaaaggacttaacatatggacgtatagtaacaaggacttggaactggtcagatacatgcacaccacaattacattttacagacacccagacacagactttatagcagtatacaacagaaaaacaccactaggtggcaacagatacacagcaccctcactgcaccctggtaacatgatgctgcagagaactaaaatactaatccctagctttaaaaccaaacccagagggagcggcaaaattagagtagtaataaaaccccccactctgttagtagataagtggtactttcaaaaggacatatgcgacgttacactgtttaacctcaacattacagcagctagcctgcggtttccgttctgctcaccacaaacgaacaacccttgtgtaacattccaagttctgcattctgtgtatgacaaagcattaggcattaacacatttggtaccaaagaaacaccagaagatcagcaaatggaagatattaaaaactggcttaccaaagctctaaatactgcaggctttactgtactaaatacatttagaacagaaggtatatactcacacccacaactaaaaaaaccacctgaaggaagtaacaaacctagtgcagaacagtactttgctccactagacagcttatggggagacaagatatatgtaaataataatactagtccttcacaaacagaagcaacaattccaggtatattagccagaaatgcttgcacatactatcaaaaagctaaaacaagcacactaaggcagcacctaggcgctatggcacactgtcacctaacaggaatttttaaccctgcactactaacacagggcagactatcaccagaattttttggcctatacaaagaaattatttataacccctatgatgacaaaggcaaaggaaacagaatatggatagacccattaacaaaacctgacaacatatttgatgctagaagtaaagtagaactagaagatatgcctctttggatggcatgctttggatataatgactggtgtaaaaaagagctaaataactggggcctagaagtagaatacagagtactactaagatgcccttacacatatccaaaactgtacaatgatgctaacccaaactatggctatgtacctatatcctacaactttagtgcaggaaaaactgtagaaggggatctttatgttccaataatgtggagaactaaatggcatccaacaatgtacaatcaatctccagtactagaagatttagccatggcagggccttttgctccaaaagaaaaaatacctagcagcacacttacaataaaatacaaagctaaatttatattcgggggcaatcctatatctgaacagattgtcaaggacccctgcacccagcccacctacgaaattcccggaggcggtacgctccctcgcagaatacaagtcattaacccggaatacatcgggccacactactcattcaaaagcttcgacatcagacgtgggtactttagcgcgaagagtgttaaaagagtgtcagaacaatcagacattactgagtttatattctcaggtccaaaaaagccaaggatcgaccaagacaggtaccaagaagcagaagaacactcagattctcgactccgagaagagaaaccgtgggagagctcgcaagaaacagagagcgaagcccaagaagaagagatacaagagacaaacatccagctccagctgcagcaccagctcaaagagcaactgcagctcagacggggaatccagtgcctcttcgagcaactaaccaaaacccagcagggagtccacataaacccttccctcgtgtag

SEQ ID NO: 207 - DNA, 1812 bp, Torque teno virus
  source 1..1812: mol_type = other DNA
atgtctcttaaagtactgtatgacgaccacctaaaaggacttaacatatggacgtatagtaacaaggacttggaactggtcagatacatgcacaccacaattacattttacagacacccagacacagactttatagcagtatacaacagaaaaacaccactaggtggcaacagatacacagcaccctcactgcaccctggtaacatgatgctgcagagaactaaaatactaatccctagctttaaaaccaaacccagagggagcggcaaaattagagtagtaataaaaccccccactctgttagtagataagtggtactttcaaaaggacatatgcgacgttacactgtttaacctcaacattacagcagctagcctgcggtttccgttctgctcaccacaaacgaacaacccttgtgtaacattccaagttctgcattctgtgtatgacaaagcattaggcattaacacatttggtaccaaagaaacaccagaagatcagcaaatggaagatattaaaaactggcttaccaaagctctaaatactgcaggctttactgtactaaatacatttagaacagaaggtatatactcacacccacaactaaaaaaaccacctgaaggaagtaacaaacctagtgcagaacagtactttgctccactagacagcttatggggagacaagatatatgtaaataataatactagtccttcacaaacagaagcaacaattccaggtatactagccagaaatgcttgcacatactatcaaaaagctaaaacaagcacactaaggcagcacctaggcgctatggcacactgtcacctaacaggaatttttaaccctgcactactaacacagggcagactatcaccagaattttttggcctatacaaagaaattatttataacccctatgatgacaaaggcaaaggaaacagaatatggatagacccattaacaaaacctgacaacatatttgatgctagaagtaaagtagaactagaagatatgcctctttggatggcatgctttggatataatgactggtgtaaaaaagagctaaataactggggcctagaagtagaatacagagtactactaagatgcccttacacatatccaaaactgtacaatgatgctaacccaaactatggctatgtacctatatcctacaactttagtgcaggaaaaactgtagaaggggatctttatgttccaataatgtggagaactaaatggtatccaacaatgtacgatcaatctccagtactagaagatttagccatggcagggccttttgctccaaaagaaaaaatacctagcagcacacttacaataaaatacaaagctaaatttatattcggggcaatcctatatctgaacagattgtcaaggacccctgcacccagcccacctacgaaattcccggaggcggtacgctccctcgcagaatacaagtcattaacccggaatacatcgggccacactactcattcaaaagcttcgacatcagacgtgggtactttagcgcgaagagtgttaaaagagtgtcagaacaatcagacattactgagtttatattctcaggtccaaaaaagccaaggatcgaccaagacaggtaccaagaagcagaagaacactcagattctcgactccgagaagagaaaccgtgggagagctcgcaagaaacagagagcgaagcccaagaagaagagatacaagagacaaacatccagctccagctgcagcaccagctcaaagagcaactgcagctcagacggggaatccagtgcctcttcgagcaactaa

SEQ ID NO: 208 - DNA, 2199 bp, Torque teno virus
  source 1..2199: mol_type = other DNA
atggcctggagatggtggtggagacgcaggcgcccgtggcgatggagatggaggcgaaggagacgaccagctagacgccgaagacgtagaagacctgctcggcgtgctagacgacccagagtaaggagatggcgcaggcgcagggtgtgggcgcccaggccatacataagaaggcgcaggcgaagcttccgtagaaaaaaaattaaaataactcagtggaaccccgctgttactaaaaaatgtactgtaactgggtacctaccagttatatactgtggaaccggggacataggaaccacttttcagaactttggctctcatatgaatgagtacaaacagtataacgctgcgggagggggctttagcacaatgctttttaccatgcaaaacctgtatgaagagtaccaaaaacatagatgcagatggtctaaaagcaatcaagacctagacctgtgtagatatctagactgtaaactaacattttacagatcccctaacacagactttatagttggctacaatagaaagcctccctttatagacactcaaataacaagatgtactttacatccaggaatgctaatacaagaaagaaaaaaagtaataatacctagcttccaaaccaggccaaaaggtagaataaaacgcaaaattaaagtaaggccccccaccttattcacagacaaatggtactttcagagagacctctgtaaagttcctcttgtaacggtttccgcttctgcggcgagcctgcggtttccgttcggctcaccacaaacagaaaactattgcatatacttccaggttttagatccctggtaccacacccgcctgagcataactggtggaaagccagctgaatattggacacagctaaaagcttatttaactcaaggctggggcaggtcaacaaataatgcaggatatcaacatggtccactaggtacttactttaatacacttaaaacatcagaacatattagacaacccccagcagataactacaaacaagcaaataaagatactacatactatggaagagtagacagtcactggggagatcatgtataccaacaaacaataatacaagccatggaagaaaaccaaagcaacatgtacacaaaaagagcacttcacacattcttaggcagtcaatatctaaactttaaatcaggtctatttagcagtatatttctagataatgccagactaagcccagactttaaaggtatgtaccaagaagttgtttataacccctttaatgacagaggagtaggcaacaaagtatgggttcagtggtgcacaaacgaggacacaatatttaaagacctaccaggcagagttcctgtggtagatttaccattgtggtgcgcgttaatgggctactcagactactgcaaaaaatatttccacgacgatggcttcttaaaagaggccagaataactataatcagcccatacacaaatcctccactaattaacaacaaaaatacaaatgagggctttgtaccctacagtttctactttggaaaaggcagaatgccagacggcaatgggtacatacccatagactttagatttaactggtacccttgcatatttcaccaaacaaactggataaatgacatggttcaatgcggaccctttgcctaccacggagatgaaaagaactgttctctcactatgaaatacaagtttaaatttctatttgggggcaatcctatctcacaacagactatcaaagacccttgccaacaacccgactggcaacttcccggttccggtagattccctcgcgatgtacaagtatcgaacccgcgcttgcaaaccgaagggtccacgttccacgcgtgggacttcagacggggtttctatggcaaaagagctattgaaagactgcagggacaacaagatgatgttacatatattgcaggacctccaaaaaggccccgcttcgaggtcccagccctggctgccgaaggaagctcaaatacacgccgatcagagttgccatggcaaacctcagaagaagaaagctcgcaagaagaaaactcagaagagacagaagaagaaacctcgttatcgcagcagctcaagcagcagtgcatcgagcagaagctcctcaagcgaacgctccaccaactcgtcaagcaattagtaaagacccagtatcacctacacgcccccattatccactaa

SEQ ID NO: 209 - DNA, 2181 bp, Torque teno virus
  source 1..2181: mol_type = other DNA
atggcatggagatggtggaagcgacggaggcgctggtggttccgcaagcggtggacccgtggcagacttcgcagacgatggcctcgaccagctcgtcgccgccctagacgacgaagagtaaggagacgcagacggtggaggagggggcgacccagacgcagactgtaccgacgctacagacgcaaaaaacgtaggagacgaaagcccaaaataatcttaaaacaatggcagccagacattgtaaaaagatgctatataataggctacattcctgccataatatgtggggctggcacctggtcccacaactacaccagccacctgttagacattatccccaagggaccctttggaggagggcacagcactatgagattctccctaaaagtactctttgaagaacacctcagacacttaaacttttggacaaaaagcaaccaggacctagaacttataagatactttagatgctcctttaaattctatagagaccaagacacagactacatagtacactacagcagaaagactcccctaggaggcaacagactgacagcacctagcctacaccccggggtacagatgcttagcaaaaacaaaatattagtacctagctatgctacaaaacccaagggtggtagctatgtaaaagtaaccatagcaccccccacactactaactgacaagtggtactttagcaaagacgtttgtgacacaaccttggttaacttagacgtcgtactctgcaacttgcggtttccgttctgctcaccacaaactgacaacccttgcatcacattccaagttctgcattcttactacaacgactacctctctatagtagacaccgccttatacaaaaccagctttgtaaacaatttaagtacaaaactaggtacaacatgggcaaacagactaaacacatttagaacagaaggctgctactcacatccaaaattgctcaaaaaaacagtaacagctgcaaatgacaccaaatattttactacaccagacggactctggggagatgcagtatttgatgtttcagacgcaaaaaaactaactaaaaacatggaaagttatgctgcctctgctaacgaaagaggcgtacaaggagaccctgccttttgccacctaacaggcatattctcacctccctggctaacaccaggcagaatatctcctgaaaccccaggactttacacagacgtgacttacaacccatacgcagacaaaggagtgggcaacagaatatgggttgactactgtagtaaaaaaggcaataaatatgacaatacaagtaaatgcgtgttagaagacatgccactatggatgttatgctttggctatgtagactgggtaaaaaaagagactggcaactggggcattccactatgggccagagtacttataagaagcccatatactgtcccaaaactataccatgaaaacgaccctgactacggatgggttccaatttcctactactttggagaaggcaaaatgccaaacggagacatgtacgtaccatttaaagtaagaatgaaatggtacccttcaatgtggaaccaagagccagttttaaatgacttagcaaagagcggaccgtttgcatacaagaacaccaaaacaagcgtgactgtgactgccaaatataaattcacatttaacttcgggggcaaccccgtaccctcacagattgtacaagatccctgcacacagcccacctacgacatccccggcaccggtaacctgcctcgcagaatacaagtcattgacccgaaagtcctcggtccccactattccttccaccggtgggacttcaggcgtggcctctttggcacacaagctattaaaagagtgtcagaacaatcaacaacttctgagtttttattctcaggcccaaagaaacccagaatcgatcaaggcccttacatcccgccagaaaaaggctcaggttcactccaaagagaatcgagaccgtggagcagctcggagaccgaggcagagacagaagccccctcggaagaggagccggagaaccaagaagaacaagtactccagttgcagctcagacagcagctccgagaacagcgaaaactcagacagggaatccagtgcctattcgagcaactgataacaacccagcagggggtccacaaaaacccattgttagagtag

SEQ ID NO: 210 - DNA, 2283 bp, Torque teno virus
  source 1..2283: mol_type = other DNA
atggcctggtggggacggtggagaagatggcgctggaggccccgtcgctggcggcgccgtcgcagacgccgagtaccaagaagaagagctcaacgctctgttcgacgccgtcgagcaagaagagtaaggaggaggcgatgggggaggcggaggtggagacgggggtacagacgcagactgagactaagacgcaaacgcaaacgaaaacgcagacttgtactgactcagtggcaccccgctaaagtaaggaggtgcagaatatctggggtcctacccatgatactgtgcggtgctggcaggagtagctttaactacgggctgcacagcgatgactttactaaacagaaaccaaacaatcagaacccgcacggcgggggcatgagcactgtgacttttaacctaaaggtgctctttgaccaatacgaaagatttatgaacaagtggtcgtaccccaacgaccaactagacctcgccagatacaaaggctgtaaattcaccttctacagacacccagaagttgactttctagctcaatatgacaacgttccccctatgaaaatggacgaactgactgcccctaacactcaccccgcactgctgctacagagcagacacagggtaaagatatacagctggaaaaccaggccatttggctctaaaaaagtaacagtaaaaataggaccccccaaactgtttgaagacaagtggtacagccagtctgacttgtgcaaagtttcccttgtcagttggcggttaaccgcatgtgacttcaggtttccgttctgctcaccacaaactgacaacccttgtgtaaccttccaggtgctaggagaacagtattacgaagtctttggaacttccgtattggacgttcctgcatcctataactcacaaataactacatttgaacaatggctatataaaaaatgcacccactatcaaacattcgccacagacaccagattagccccccaaaagaaagcaaccacatccaccaaccacacatataaccccagtggcaacactgaatcatcaacatggacacaaagtaactactccaaatttaaaccaggcaacacagacagcaactatggctactgcagttataaagtagacggcgaaacatttaaggccattaaaaattacagaaagcaaagattcaaatggctaaccgaatacacaggagagaatcacataaacagcacatttgcaaagggcaaatatgatgaatacgagtaccacctagggtggtactctaacatatttataggcaaccttagacacaacctggcattccgctcagcatacatagatgtaacttacaaccccacagtagacaaaggcaaaggcaacatagtgtggttccagtacctgacaaaacccaccacacagctgataagaacacaggcaaaatgcgttatagaagacctgccactttactgtgccttttttggctacgaggactatatacagagaacactaggcccttaccaggacatagagacagtaggcgtcatctgctttataagcccctacacagaacctccatgtattagaaaagaagagcaaaaaaaggactggggctttgtattttatgacaccaactttggaaacggaaaaacaccagagggcataggccaagttcacccctactggatgcagaggtggagagtaatggcccagtttcaaaaagaaactcaaaacagaattgccaggagcggaccgtttagctacagagacgacataccctcagccacactgactgccaactacaagttctactttaactgggggggcgactctatatttccacagattattaagaacccctgccccgacaccgggctgcgacccagtggccatagagagcctcgctcagtacaagtcgttagcccgctcaccatgggaccagagttcatattccaccgctgggactggcgacgggggttctataatccaaaagctctcaaacgaatgcttgaaaaatcagataatgatgcagagtcttcaacaggcccaaaagtgcctcggtggtttccagcacaccacgaccaagagcaagaaagcgacttcgattcacaagagacaaggtcgcagtcctcgcaagaagaagccgctcaagaagccctccaagacgtccaagagacgtcggtacagcagtacctcctcaagcagttccgagagcagcggctactcggacagcaactccgcctcctcatgctccaactcaccaagacgcaaagcaatctccacataaatccccgtgtccttgaccatgcataa

SEQ ID NO: 211 - DNA, 2220 bp, Torque teno virus
  source 1..2220: mol_type = other DNA
atgttctggtggggatggcgccgccgatggtggtggaagccacggaggcgatggagacgcaggagggcgcgccgcccgagacgagtaccgcgaagacgatatagaagagctgctcgccgctatcgaggcagacgagtaaggaggcgccgcgcggggggctggcgggggcgacgtagatactcccgacactatagcagacgactgactgtcaggcgaaagaaaaagaaactgactcttaagatctggcagccacagaatatcaggaaatgtagaataaggggtctcctgcccctcctgatatgcgggcacacccgttcggcctttaactatgccatccactcggatgacaagaccccccaacaggagagtttcgggggcggcctcagcaccgtcagcttctccttaaaagtactgtttgaccagaaccagaggggacttaataggtggtcggccagcaacgaccaactggaccttgctcggtacctggggtgcactttctggttctacagagacaaaaagactgattttatagtgcagtatgatatcagcgcccccttcaagctggacaaaaacagcagtcccagctaccaccccttcatgctcatgaaggcaaaacacaaggtgctaattcccagctttgacactaaacccaagggcagggaaaaaattaaagttagaatacagccccccaaaatgttcatagacaagtggtacacacaagaggacctgtgtcccgttattcttgtgtcacttgcggttagcgtagcttcctttacacatccgttctgctcaccacaaactgccaatccttgcatcaccttccaggttttgaaagagttctattacccagccatgggctatggggcccctgaaacaactgtcacttctgtatttaacactttatataccacagccacctactggcagtctcaccttaccccccagtttgtcagaatgcccaccaaaaacccagacaatactgaaaacaaccaagctcaagcctttaatacctgggttgataaagatttcaaaacaggcaagttagtaaagtataactttccccagtatgctccttcaatagagaaactaaaacaattaagaacatactactttgaatgggaaactaaacacactggggttgcagcaccacctacctggaccacccctacctcagacagatacgagtaccatatgggaatgttcagtcccactttcctcacaccgttcaggtcagctggcctagactttcccggagcctaccaggacgtcacctacaatcccctcacagacaagggggtgggcaacagaatgtggttccaatacaacaccaagatagacactcagttcgacgccaggtcctgcaagtgcgtactagaggacatgcccctgtacgccatggcctacgggtatgcagactttttagagcaagagataggagagtaccaggacctagaggccaacgggtacgtctgtgtaataagcccctacaccaaacccccaatgttcaacaaacacaacccgcaacaggggtacgtattctatgactctcagtggggcaacggcaagtggatagacggaaccgggttcgtgcccgtctactggctgaccagatggagagtagagctgctatttcagaaaaaagtactgtcagacatcgccatgtcaggccccttcagctacccagacgaacttaaaaacactgtactgacggccaaatacagatttgactttaagtggggtggcaatctcttccaccagcagaccattagaaacccctgcaaaccagaagagacctcgaccggtagagtccctcgcgatgtacaagtcgttgacccggtcaccatgggccccagattcgtctttcactcctgggactggaggcgagggttccttagtgacagagctctcaaaagaatgtttgaaaaaccgctcgatcttgagggatttgcagcgtctccaaaacgacctcgcatattccctcccacagagggacagctcgcccgagagcaaaaagagcaagaagaaagctcagattcgcaggaagaaagcagccttacctcgctcgaagaagtcccggaagagacgaagctacgactccacctcagaaagcagctcagagagcagcgaagcatcagacagcaactccgaaccatgttccagcaacttgtcaagacgcaagcgggcctacacctaaacccccttttatcttcccagctgtaa

SEQ ID NO: 212 - DNA, 2304 bp, Torque teno virus
  source 1..2304: mol_type = other DNA
atggcctggcgatggtggtggcagagacgatggcgccgccgcccgtggccccgcagacggtggagacgcctacgacgccggagacctcgacgacctgttcgccgccgtcgaagacgagcaacagtaaggaggcggaggtggaggggcagacgtgggcgacgcacatacacccgacgcgcggtcagacgcagacgcagacccagaaagagatttgtactgactcagtggagcccccagacagccagaaactgttcaataaggggcatagtgcccatggtaatatgcggacacaccagagcaggtagaaactatgcccttcacagcgaggactttaccactcagataagaccctttggaggcagcttcagcacaaccacctggtccctaaaagtactgtgggacgaacaccagaaattccaaaacagatggtcctacccaaacacacagctggacctagccaggtacaggggggtcaccttctggttctacagagaccagaaaacagactatatagtacaatggagcagaaatcctccctttaaactaaacaaatacagcagccccatgtaccaccctggaatgatgatgcaggcaaaaaagaaactggtggtccccagtttccagaccagacctaaaggcaaaaagagatacagagtcagaataagaccccccaacatgttcaatgacaagtggtacactcaagaggacctttgtccagtacctcttgtgcaaattgtggtttctgcggctacccagacaaaaaagaactgctcaccacaaacgaacaacccttgcatcactttccaggttttgaaagacaagtacttaaactacataggagttaactcttccgagacccgaagaaacagttataaaactctacaagagaaactttactcacaatgcacatactttcaaaccacacaagttttagctcaattatctccagcatttcagcccgcaaagaaacctaacagaaccaacaactcaaccagcacaacactaggcaacaaagtcacagacctaaaatccaacaatggcaaattccacacaggcaacaacccagtgtttggcatgtgttcatataaacccagcaaggacatactatataaagcaaacgaatggttgtgggacaatctcatggttgaaaatgatttacattccacatatggcaaggcaacccttaaatgcatggagtaccacacaggcatttacagctccatattcctaagtcctcaaaggtccctagaattcccagcagcataccaagatgtcacatacaacccaaactgtgacagagccataggcaaccgtgtatggttccaatatggcacaaaaatgaacacaaactttaatgaacaacagtgtaagtgtgtgttaacaaacattcccctgtgggcggcctttaacggctacccagactttatagaacaagaactcggtatcagcacagaggtacacaactttggcatagtatgtttccagtgcccctacacctttcccccactctatgacaaaaagaacccagataaaggctacgtattttatgacaccacctttgggaacggaaaaatgccagacgggtcaggccacattcccatctactggcagcagagatggtggatcagactagcctttcaagtacaagtcatgcatgactttgtactcactggcccctttagctacaaagatgacctagcaaacactacactaacagccaggtacaagttcagattcaaatggggcggtaatatcatccccgaacagattatcaagaacccgtgtaagagagaacagtccctcggttcctaccccgatagacaacgtcgcgacctacaagttgttgacccatcaaccatgggcccgatctacaccttccacacatgggactggcgacgggggctttttggtgcagatgctatccagagagtgtcacaaaaaccggaagatgctctccgctttacaaaccctttcaagagacccagatatcttcccccgacagacggagaagactaccgacaagaagaagacttcgctttacaggaaagaagacggcgcacatccacagaagaagtccaggacgaggagagccccccgcaaaacgcgccgctcctacagcagcagcagcagcagcgggagctctcagtccagcacgcggagcagcagcgactcggagtccaactccgatacatcctccaagaagtcctcaaaacgcaagcgggtctccacctaaaccccctattattaggcccgccacaaacaaggtgtatatctttgagccccccagaggcctactccccatag

SEQ ID NO: 213 - DNA, 2313 bp, Torque teno virus
  source 1..2313: mol_type = other DNA
atggcagcctggtggtggggcaggcggagacgctggcgcaggtggaggcgccgccgcctccctcgccgccgccgctggcgacggaggagacggtggcccagaagacgcaggcggagatggccgcgcagacgcagacgtcgcagacctgctcgccgccctagaaggagacgcagacgccgaagggtaaggagacctcgccggcgccaaaaactggtactgactcagtggaaccctcagacagttagaaagtgcattatcagagggttcgtgccgctgttccagtgcagcagaactgcctaccacaggaactttgtagaccacatggacgacgtgtacaccacgggtcccttcgggggcggcacggggtccatgcttttcaccctgagcttcttctaccacgagtttaaaaagcaccactgcaagtggtccgccagcaacagagactttgacttgtgtagatacaggggcacggttctaaagttttatagacatccagacgtagactacatagtttggctgaacagaaacccccctttccaggaaaacctattagacgccatgagcagacagcccctcataatgttacagactcacaagtgcatactggtgaggagctttaaaacgcaccccaggggaccctcgtacgtcagaatgaaagttagacccccgagactacttacagacaagtggtactttcagtcagacttctgcaacgttccgcttttccagctacagtttgctcttgcggaactgcggtttccgatcggctcaccacaaacgaacaccacttgtgtaaacttcctggtgttagataacaggtaccacttatttttagataacaaaccacaacagtcagacaactcacaaagagaagagagggggcacggttatccctttaacggtagtgagggagaagctgatagactaaaattctggcacagtttgtggaatacaggcagattcctaaacaccactcacattaacaccctacagccaaacatctctaaattacaagaacataaagctgaagacacagaggcaaaaactacctataaaagtttaattaacggtaacaaaaaggtatataacgatagtcaatacatgcaaaacgtttgggcacaaaacaaaataaataccctttatgaggctatagcagaagaacaatacagaaaaatacaaaagtactataacaccacatacgggcagtaccaaaggcaactatttacaggcaagaagtactgggactacagagtaggcatgttcagtcccaccttcctaagtcccagcagactaaatccagagatgccaggtgcctacacagagatagcctataacccctggacagacgagggcacgggcaacgttgtgtgcctgcagtacctaacaaaagaaacctcagactacaagccacacgcaggtagcaaattcaccatagaggacgtacccctgtggatagccatgaatgggtacgtggacatatgtaaaaaagagggcaaagatccaggcataagactaaactgccttatgtgtataaggtgcccgtacaccaggcccaaactttacaaccccagataccccaaagaactgtttgtagtgtactcttacaactttgcccacgggcgcatgcccgggggggacaaatacatacccatggagtttaaggacaggtggtacccgtcgctcatgcaccaggaagaggtcatagaggacatagtcaggagcggcccctttgccctaaaagaccagacagagatggttacttgcatgatgaggtactcggccctgtttaactggggcggtaatattatccgcgaacaggccgtggaagacccctgtaaaaagaacacctttgcccttcccggagccagtggagtcgctcgcctactacaagtcagcaacccgatcaggcagacccccagcaccacctggcactcgtgggactggagaaggtccctctttacacaaacgggtattaaaagaatgcgcgaacaacaaccgtatgatgaaattacttatgcagggcctaagaggccaaaactcacagttcccgcaggacccaccctcgctgccggagacgcctacaactactgggaaagaaaaccgctcacctcgcccggagagacgctcccgacccagacggagacagagacagaagccccagaggaagaagcccagcaagaagaagtccaggagggcctccagctccagcagctctgggagcagcaactccagcaaaagcgacagctgggagtcatgttccagcaactcctccgactcagaacgggggcggaaatacacccggccctcgcatag

SEQ ID NO: 214 - DNA, 2313 bp, Torque teno virus
  source 1..2313: mol_type = other DNA
atggcagcctggtggtggggcaggcggagacgctggcgcaggtggaggcgccgccgcctccctcgccgccgccgctggcgacggaggagacggtggcccagaagacgcaggcggagatggccgcgcagacgcagacgtcgcagacctgctcgccgccctagaaggagacgcagacgccgaagggtaaggagacctcgccggcgccaaaaactggtactgactcagtggaaccctcagacagttagaaagtgcattatcagagggttcgtgccgctgttccagtgcagcagaactgcctgccacaggaactttgtagaccacatggacgacgtgtacaccacgggtcccttcgggggcggcacggggtccatgcttttcaccctgagcttcttctaccacgagtttaaaaagcaccactgcaagtggtccgccagcaacagagactttgacttgtgtagatacaggggcacggttctaaagttttatagacatccagacgtagactacatagtttggctgaacagaaacccccctttccaggaaaacctattagacgccatgagcagacagcccctcataatgttacagactcacaagtgcatactggtgaggagctttaaaacgcaccccaggggaccctcgtacgtcagaatgaaagttagacccccgagactacttacagacaagtggtactttcagtcagacttctgcaacgttccgcttttccagctacagtttgctcttgcggaactgcggtttccgatcggctcaccacaaacgaacaccacttgtgtaaacttcctggtgttagataacaggtaccacttatttttagataacaaaccacaacagtcagagaacctacaaagaaaagagagggggcacggttattcctttacgggtaatgagggagaagttgatagactaaaattctggcacagtttgtggaatacaggcagattcctaaacaccactcacattaacaccctactgccaaacatctctaaattacaagaacataaagctgaagacagacaggcaaatgctaagtataaaaatttaattaacggtaacaaaaaggtatataacgatagtcaatacatgcaaaacgtttgggaagaaaacaaaataaataccctttatgacgctatagcagaagaacaatacagaaaaatacaaaagtactataacaccacatacgggcagtaccaaaggcaactatttacaggcaagaagtactgggactacagagtaggcatgttcagtcccaccttcctaagtcccagcagactaaatccagagatgccaggtgcctacacagagatagcctataacccctggacagacgagggcacgggcaacgttgtgtgcctgcagtacctaacaaaagaaacctcagactacaagccacacgcaggtagcaaattcaccatagaggacgtacccctgtggatagccatgaacgggtacgtggacatatgtaaaaaagagggcaaagatccaggcataagactaaactgccttatgtgtataaggtgtccgtacaccaggcccaaactttacaaccccagataccccgaagaactgtttgtagtgtactcttacaactttgcccacgggcgcatgcccgggggggacaaatacatacccatggagtttaaggacaggtggtacccgtcgctcatgcaccaggaagaggtcatagaggacatagtcaggagcggcccctttgccctaaaagaccagacagagatggttacttgcatgatgaggtactcggccctgtttaactggggcggtaatattatccgcgaacaggccgtggaagacccctgtaaaaagaacacctttgcccttcccggagccagtggagtcgctcgcctactacaagtcagcaacccgatcaggcagacccccagcaccacctggcactcgtgggactggagaaggtccctctttacacaaacgggtattaaaagaatgcgcgaacaacaaccgtatgatgaaattacttatgcagggcctaagaggccaaaactcacagttcccgcagggcccaccctcgctgccggagacgcctacaactactgggaaagaaaaccgctcacctcgcccggagagacgctcccgacccagacggatacagagacagaagccccagaggaagaagcccagcaagaagaagtccaggagggcctccagctccagcagctctgggagcagcaactccagcaaaagcgacagctgggagtcatgttccagcaactcctccgactcagaacgggggcggaaatacacccggccctcgcatag

SEQ ID NO: 215 - DNA, 2313 bp, Torque teno virus
  source 1..2313: mol_type = other DNA
atggcagcctggtggtggggcaggcggagacgctggcgcaggtggaggcgccgccgcctccctcgccgccgccgctggcgacggaggagacggtggcccagaagacgcaggcggagatggccgcgcagacgcagacgtcgcagacctgctcgccgccctagaaggagacgcagacgccgaagggtaaggagacctcgccggcgccaaaaactggtactgactcagtggaaccctcagacagttagaaagtgcattatcagagggttcgtgccgctgttccagtgcagcagaactgcctaccacaggaactttgtagaccacatggacgacgtgtacaccacgggtcccttcgggggcggcacggggtccatgcttttcaccctgagcttcttctaccacgagtttaaaaagcaccactgcaagtggtccgccagcaacagagactttgacttgtgtagatacaggggcacggttctaaagttttatagacatccagacgtagactacatagtttggctgaacagaaacccccctttccaggaagacctattagacgccatgagcagacagcccctcataatgttacagactcacaagtgcatactggtgaggagctttaaaacgcaccccaggggaccctcgtacgtcagaatgaaagttagacccccgagactacttacagacaagtggtactttcagtcggacttctgcaacgttccgcttttccagctacagtttgctcttgcggaactgcggtttccgatcggctcaccacaaacgaacaccacttgtgtaaacttcctggtgttagataacaggtaccacttatttttagataacaaaccacaacagtcagacaacccacaaagaaaagagagggggcacggttattcctttacgggtaatgagggagaaatggatagagaaagattctggcacagtttgtggagtacaggcagattcctaaacaccactcacattaacaccctactgccaaacatctctaaattacaagaccataaagctgaagacaaagacgcaaaaactacctataaaagtttaattaacgataacaaaaaggtatataacgatagtcaatacatgcaaaacgtttgggaccaaaacaaaatacataccctttatatggctatagcagaagaacaatacagaaaaatacaaaagtactataacaccacatacgggcagtaccaaaggcaactatttacaggcaagaagtactgggactacagagtaggcatgttcagtcccaccttcctaagtcccagcagactaaatccagagatgccaggtgcctacacagagatagcctataacccctggacagacgagggcacgggcaacgttgtgtgcctgcagtacctaacaaaagaaacctcagactacaagccacacgcaggtagcaaattcaccatagaggacgtacccctgtggatagccatgaacgggtacgtggacatatgtaaaaaagagggcaaagatccaggcataagactaaactgccttatgtgtataaggtgtccgtacaccaggcccaaactttacaaccccagataccccgaagaactgtttgtagtgtactcttacaactttgcccacgggcgcatgcccgggggggacaaatacatacccatggagtttaaggacaggtggtacccgtcgctcatgcaccaggaagaggtcatagaggacatagtcaggagcagcccctttgccctaaaagaccagacagagatggttacttgcatgatgaggtactcggccctgtttaactggggcggtaatattatccgcgaacaggccgtggaagacccctgtaaaaagaacacctttgcccttcccggagccagtggagtcgctcgcctactacaagtcagcaacccgatcaggcagacccccagcaccacctggcactcgtgggactggagaaggtccctctttacacaaacgggtattaaaagaatgcgcgaacaacaaccgtatgatgaaattacttatgcagggcctaagaggccaaaactcacagttcccgcagggcccaccctcgctgccggagacgcctacaactactgggaaagaaaaccgctcacctcgcccggagagacgctcccgacccagacggagacagagacagaagccccagaggaagaagcccagcaagaagaagtccaggagggcctccagctccagcagctctgggagcagcaactccagcaaaagcgacagctgggagtcatgttccagcaactcctccggctcagaacgggggcggaaatacacccggccctcgcatag

SEQ ID NO: 216 - DNA, 2313 bp, Torque teno virus
  source 1..2313: mol_type = other DNA
atggcagcctggtggtggggcaggcggagacgctggcgcaggtggaggcgccgccgcctccctcgccgccgccgctggcgacggaggagacggtggcccagaagacgcaggcggagatggccgcgcagacgcagacgtcgcagacctgctcgccgccctagaaggagacgcagacgccgaagggtaaggagacctcgccggcgccaaaaactggtactgactcagtggaaccctcagacagttagaaagtgcattatcagagggttcgtgccgctgttccagtgcagcagaactgcctaccacaggaactttgtagaccacatggacgacgtgtacaccacgggtcccttcgggggcggcgcggggtccatgcttttcaccctgagcttcttctaccacgagtttaaaaagcaccactgcaagtggtccgccagcaacagagactttgacttgagtagatacaggggcgcggttctaaagttctatagacatccagacgtagactacatagtttggctgaacagaaacccccctttccaggaaaacctattagacgccatgagcagacagcccctcataatgttacagactcacaagtgcatactggtgaggagctttaaaacgcaccccaggggaccctcgtacgtcagaatgaaagttagacccccgagactacttacagacaagtggtactttcagtcagacttctgcaacgttccgcttttccagctacagtttgctcttgcggaactgcggtttccgatcggctcaccacaaacgaacaccacttgtgtaaacttcctggtgttagacaacaggtaccactcatttttagataacaaaccacaacagtcagagaactcacaaagaaaagagagggggcacggttattcctttacgggtaaagagggagaacaggatagactaacattctggcagagtttgtggaatacaggcagattcctaaacaccactcacattaacaccctactgccaaacatctctaaattacaagaccataaagctgaagacacagacgcaaatcctgactataaaagtttaattaacggtaacaaaaaggtatataacgatagtcaatacatgcaaaacgtttggcaacaaggcaaaataaataccctttgtaacgctatagcacaggaacaatacagaaaaatacaaaagtactataacaccacatacgggcagtaccaaaggcaactatttacaggcaagaaatactgggactacagagtaggcacgttcagtcccaccttcctaagtcccagcagactaaatccagagatgccaggtgcctacacagagatagcctataacccctggacagacgagggcacgggcaacgttgtgtgcctgcagtacctaacaaaagaaacctcagactacaagccacacgcaggtagcaaattcaccatagaggacgtacccctgtggatagccatgaacgggtacgtggacatatgtaaaaaagagggcaaagatccaggcataagactaaactgccttatgtgtataaggtgtccgtacaccaggcccaaactttacaaccccagataccccgaagaactgtttgtagtgtactcttacaactttagccacgggcgcatgcccgggggggacaaatacatacccatggagtttaaggacaggtggtacccgtcgctcatgcaccaggaagaggtcatagaggacatagtcaggagcggcccctttgccctaaaagaccagacagacatggttacttgcatgatgaggtactcggccctgtttaactggggcggtaatattatccgcgaacaggccgtggaagacccctgtaaaaagaacacctttgcccttcccggagccagtggagtcgctcgcctactacaagtcagcaacccgatcaggcagacccccagcaccacctggcactcgtgggactggagaaggtccctctttacacaaacgggtattaaaagaatgcgcgaacaacaaccgtatgatgaaattacttatgcagggcctaagaggccaaaactcacagttcccgcagggcccaccctcgctgccggagacgcctacaactactgggaaagaaaaccgctcacctcgcccggagagacgctcccgacccagacggagacagagacagaagccccagaggaagaagcccagcaagaagaagtccaggagggcctccagctccagcagctatgggagcagcaactccagcaaaagcgacagctgggagtcatgttccagcaactcctccgactcagaacgggggcggaaatacacccggccctcgcatag

SEQ ID NO: 217 - DNA, 2313 bp, Torque teno virus
  source 1..2313: mol_type = other DNA
atggcagcctggtggtggggcaggcggagacgctggcgcaggtggaggcgccgccgcctccctcgccgccgccgctggcgacggaggagacggtggcccagaagacgcaggcggagatggccgcgcagacgcagacgtcgcagacctgctcgccgccctagaaggagacgcagacgccgaagggtaaggagacctcgccggcgccaaaaactggtactgactcagtggaaccctcagacagttagaaagtgcattatcagagggttcgtgccgctgttccagtgcagcagaactgcctaccacaggaactttgtagaccacatggacgacgtgtacaccacgggtcccttcgggggcggcacggggtccatgcttttcaccctgagcttcttctaccacgagtttaaaaagcaccactgcaagtggtccgccagcaacagagactttgacttgtgtagatacaggggcacggttctaaagttttatagacatccagacgtagactacatagtttggctgaacagaaacccccctttccaggaaaacctattagacgccatgagcagacagcccctcataatgttacagactcacaagtgcatactggtgaggagctttaaaacgcaccccaggggaccctcgtacgtcagaatgaaagttagacccccgagactacttacagacaagtggtactttcagtcagacttctgcaacgttccgcttttccagctacagtttgctcttgcggaactgcggtttccgatcggctcaccacaaacgaacaccacttgtgtaaacttcctggtgttagataacaggtaccacttatttttagataacaaaccacgacagtcagagaacttacaaagaaaagagagggggcacggttatgtctttacgggtaatgagggagaagatgatagactaaaattctggcacagtttgtggagtacaggcagattcctaaacaccactcacattaacaccctactgccaaacatctctaaattacaagaccatgaagctgaagacacacaggcaaaaactgactataaaagtttaattaacggtaacaaaaaggtatataacgatagtcaatacatgcaagacgtttgggaacaaaagaaaatacaaaccctttataaggttatagcagaagaacaatacagaaaaatagaaaagtactataacaccacatacgggcagtaccaaaggcaactatttacaggcaagaagtactgggactacagagtaggcatgttcagtcccaccttcctaagtcccagcagactaaatccagagatgccaggtgcctacacagagatagcctataacccctggacagacgagggcacgggcaacgttgtgtgcctgcagtacctaacaaaagaaacctcagactacaagccacacgcaggtagcaaattcaccatagaggacgtacccctgtggatagccatgaacgggtacgtggacatatgtaaaaaagagggcaaagatccaggcataagactaaactgccttatgtgtataaggtgtccgtacaccaggcccaaactttacaaccccagataccccgaagaactgtttgtagtgtactcttacaactttgcccacgggcgcatgcccgggggggacaaatacatacccatggagtttaaggacaggtggtacccgtcgctcatgcaccaggaagaggtcatagaggacatagtcaggagcggcccctttgccctaaaagaccagacagagatggttacttgcatgatgaggtactcggccctgtttaactggggcggtaatattatccgcgaacaggccgtggaagacccctgtaaaaagaacacctttgcccttcccggagccagtggagtcgctcgcctactacaagtcagcaacccgatcaggcagacccccagcaccacctggcactcgtgggactggagaaggtccctctttacacaaacgggtattaaaagaatgcgcgaacaacaaccgtatgatgaaattacttatgcagggcctaagaggccaaaactcacagttcccgcagggcccaccctcgctgccggagacgcctacaactactgggaaagaaaaccgctcacctcgcccggagagacgctcccgacccagacggagacagagacagaagccccagaggaagaagcccagcaagaagaagtccaggagggcctccagctccagcagctctgggagcagcaactccagcaaaagcgacagctgggagtcatgttccagcaactcctccgactcagaacgggggcggaaatacacccggccctcgcatag

SEQ ID NO: 218 - DNA, 2211 bp, Torque teno virus
  source 1..2211: mol_type = other DNA
atggctgcctggtggtggggcaggaggcggcgatggcgccggtggagacggcgccgtctccctcgccgccgccgctggcgacggaggagacggtggcccaggaggcgtaggcggagatggccgcggagacgcagacgtcgcggacctgctcgccgccttagaaggagacgtcgacgcagaagggtaaggagacctcgccggcgccaaaaactcgtactgactcagtggaacccccagacccagagaaagtgcgtggtcagggggtttctgcccctgttcttttgcggacagggagcctatcacagaaactttgtggaacacatggacgacgtgttccccaagggaccctcgggagggggctttggcagcatggtgtggaacctagattttttgtaccaagagtttaaaaagcatcacaacaagtggtcttccagcaacagggactttgacctagtgaggtgccacggcacggtgattaaattctacagacactctgactttgactacctggtgcacgtcaccaggacccctcctttcaaggaggacctcctcaccatcgtcagccaccagccggggctcatgatgcagaactacaggtgcatactcgtaaagagttacaagacgcaccccggggggcgaccctacataacacctaaaataaggccccccagactcctgacggacaagtggtactttcggcccgacttctgcggagttcctcttttcaaactgtacgttactcttgcagagttgcggtttccgatctgctcaccacaaactgacaccaattgtgtcaccttcctggtgttagacaacacctactacgactacttagacaatactgcagacaccactagagaccatgaaagacagcagaaatggacaaacatgaaaatgacacccagataccatctcaccagtcacataaatacattgtttagtggaacacaacagatgcaaagcgcaaaagaaacaggcaaagacagtcagtttagagaaaacatctggaaaacagctgaggttgttaaaattattaaagatatagcctcaaaaaacatgcaaaaacaacaaacctactacacaaaaacctatggcgcctatgccacccagtattttactggaaaacaatactgggactggagggtgggcctgttcagccccatattcctcagtcccagcagactgaacccacaagagccaggggcctacacagaaatagcttacaatccatggactgacgagggcacgggcaacatagtgtgcattcagtacctaacaaagaaagacagtcactacaagccgggtgccggtagcaaattcgcagtgacggacgttcccctgtgggccgccctgttcgggtactacgaccagtgtaagaaagaaagcaaagacgcgaacataagactaaaccgcttgctgttagtcaggtgcccttacaccaggcctaaactgtacaatcccagagacccggaccaactgtttgtaatgtacagctacaactttgggcacggacgcatgccggggggcgacaagtacgtgcccatggaatttaaggacaggtggtacccgtgcatgctgcaccaagaagaagtagtggaggagatagtaaggtgcgggccctttgctcccaaagacatgactccctcggtaacatgcatggccagatactcatccctgttcacctgggggggcaatatcattcgcgaacaggccgtggaggacccctgtaaaaaatccacgtttgccattcccggagccggtggactcgctcgcattctacaagtcagcaacccgcagaggcaagcccccaccaccacctggcactcgtggggctggcgccgatccctctttacagagacgggtcttaagcgaatgcaggaacaacaaccttacgatgaaatgtcctatacaggccctaaaaggccaaaactgtctgttcccccagcagcagaaggaaacctcgctgcaggaggaggcttattcttcagggacggaaaacagcctgcctcgccaggaggcagtctcccgacgcagtcggagacagaagcagaagccgaagacgaagaagcccaccaagaagagacggaggagggagcgcagctccagcagctctgggagcagcaactccaacagaagcgagagctgggaatcgttttccaacacctcctccgactccgacagggggcggaaatccacccgggcctcgtataa

SEQ ID NO: 219 - DNA, 2211 bp, Torque teno virus
  source 1..2211: mol_type = other DNA
atggctgcytggtggtggggcaggaggcggcgatggcgccggtggagacggcgccgtytccctcgccgccgccgctggcgacggaggagacggtggcccaggaggcgtaggcggagatggccgcggagacgcagacgtcgcagacctgctcgccgccttagaaggagacgtcgacgcagaagggtaaggagacctcgccggcgccaaaaactcgtactgactcagtggaacccccagacccagagaaagtgcgtggtcagggggtttctgcccctgttcttctgcggacagggagcctatcacagaaactttgtggaacacatggacgacgtgttccccaagggaccctcgggagggggctttggcagcatggtgtggaacctagattttttgtaccaagagtttaaaaagcatcacaacaggtggtcttccagcaacagggactttgacctagtgaggtaccacggcacggtgattaaattctacagacactctgactttgactacctggtgcacgtcaccaggacccctcctttcaaggaggacctcctcaccatcgtcagccaccagccggggctcatgatgcagaactacaggtgcatactcgtaaagagttacaagacgcaccccggggggcgaccctacataacacttaaaataaggccccccagactcctgacggacaagtggtactttcagcccgacttctgcggagttcctcttttcaaactgtacgttactcttgcagagttgcggtttccgatctgctcaccacaaactgacaccaattgtgtcaccttcctggtgttagacaacacctactacgactacttagacagtactgcagacaccactagagacaatgaaagacaccagaaatggaaaaacatgataatgacacccagataccatctcaccagtcacataaatacattgtttagtggaacacaacagatgcaaaacgcaaaagaaacaggcaaagacagtcagtttagagaaaacatctggaaaacagaagaggttgttaaaattattcacgatatagcctctagaaacatgcaaaaacaaataacctactacacaaaaacctatggcgcctatgccacccagtattttactggaaaacaatactgggactggagggtgggcctgttcagccccatattcctcagtcccagcagactgaacccacaagagccaggggcctacacagaaatagcttacaatccatggactgacgagggcacgggcaacatagtgtgcattcagtacctaacaaagaaagacagtcactacaagccgggtgccggtagcaaattcgcagtgacggacgttcccctgtgggccgccctgttcgggtactacgaccagtgtaagaaagaaagcaaagacgcgaacataagactaaactgcttgctgttagtcaggtgcccttacaccaggcctaaactgtacaatcccagagacccggaccaactgtttgtaatgtacagctacaactttgggcacggacgcatgccggggggcgacaagtacgtgcccatggaatttaaggacaggtggtacccgtgcatgctgcaccaagaagaagtagtggaggagatagtaaggtgcgggccctttgctcccaaagacatgactccctcggtaacatgcatggccagatactcatccctgttcacctgggggggcaatatcattcgcgaacaggccgtggaggacccctgtaaaaaatccacgtttgccattcccggagccggtggactcgctcgcattctacaagtcagcaacccgcagaggcaagcccccacgaccacgtggcacttgtgggactggcgccgatccctctttacagagacgggtcttaagcgaatgcaggaacaacaaccttacgatgaaatgtcttatacaggccctaaaaggccaaaactgtccgttcccccagcagcagaaggaaacctcgctgcaggaggaggcttattcttccgggacagaaaacagcccacctcgccaggaggcagtctcccgacgcagtcggagacagaagcagaagcggaagacgaagaagcccaccaagaagagacggaggagggagcgcagctccagcagctctgggagcagcaactccaacagaagcgagagctgggaatcgttttccaacacctcctccgactccgacagggggcggaaatccacccgggcctcgtataa

SEQ ID NO: 220 - DNA, 2202 bp, Torque teno virus
  source 1..2202: mol_type = other DNA
atggcatggtggtggtggagaaggagacgccgcccgtggagaaggcgctggcgctggaagagacgagcccgagtacgaaccaggagacctagacgcgctgttcgccgccgtcgaagaagagtaaggaggcggaggagggggtggaggagactatacagacgatggcgacgaaagggcagacgcagacgcagacgcaaaaagttagtaatgaaacagtggaacccctccactgtcagcagatgctatattgttggatacctgcctattattattatgggacaggggactgcatccatgaactatgcatctcactcagacgacgtgtactaccccggaccgtttggggggggaataagctctatgaggtttactttaagaatactgtatgaccagtttatgagaggacagaacttctggactaagacaaacgaggacttggacctagctagatttctaggcagcaaatggaggttctatagacacaaagatgtggactttatagtgacttacgagacctcagccccctttacagactccctagagtcaggaccacaccaacacccaggcatacagatgctaatgaaaaacaaaatactaatccctagctttgccaccaaaccaaaaggaaggtctagcattaaagttagaatacagcccccaaagctaatgatagacaagtggtacccacaaactgacttctgtgaagtaacgctgctaaccatacatgcaaccgcctgcaacttgcggtttccgttctgctcaccacaaactgacacttcctgtgttcagtttcaagtgttgtcatacaacgcttacaggcagagaatttcaatacttcctgaattatgtactagagaaaagcttagggagtttattaaacaagtagtaaaaccaaatttaacatgcataaacactctagctactccatggtgctttaaattcccagagctagacaaactaccaccagtggcaaacaatgcaacaggctggtcagttaacccagatagcggagacggagatgtaatataccaggaaactacattagaaaccaaatggattgctaacaatgatgtgtggcatacaaaagaccaaagagcacacaacaacatacatagccaatatggcatgccacaatcagacgcattagaacacaaaacaggttacttcagtccagcattattaagcccacaaagactaaacccacagataccaggcctatacataaacatagtctacaatccactaacagacaaaggagaaggcaacaaaatttggtgtgacccactaacaaaaaacacatttggctatgatccccctaaaagtaaattccttatagaaaatctgccactgtggtctgcagtaacaggatacgtagactactgcacgaaagccagcaaagatgaaagctttaaatacaactacagagtacttatccagaccccatacacagtaccagcactatacagtgactctgaaaccaccaaaaacagaggctacattcccataggcacagactttgcatacggccgcatgcctgggggagtacaacaaataccaattagatggagaatgaggtggtaccccatgctatttaatcaacaaccagtactagaagacctattccagtcaggcccctttgcataccaaggagatgctaaatcagccacactagtcggcaaatatgcctttaaatggctatggggtggcaatcgtatcttccaacaggtggtcagagacccgcgctcacaccagcaagaccaatcagttggtcccagtagacagcctagagcagtacaagtctttgacccgaagtaccaagcaccacaatggacattccacgcgtgggacatcagacgtggtctgtttggcagacaggctattaaaagagtgtcagcaaaaccaacacctgatgagcttatatcaacaggcccaaaaagacctcggctggaagtccccgcgttccaagaagagcaagaaaaagacttacttttcagacagagaaaacacaaagcctgggaggacacaacggaggaagagacagaagccccctcagaagaggaggaagagaaccaagagctccagctcgtcagacgcctccagcagcaacgagagctgggacgaggcctcagatgcctcttccagcaactaacccgcacacagatggggctgcatgtagacccccaactattggcccctgtataa

SEQ ID NO: 221 - DNA, 2235 bp, Torque teno virus 10
  source 1..2235: mol_type = other DNA
atggcatggggatggtggaaacgaaggcgcaagtggtggtggagacgacgctggactcgtggccgacttcgcaaacgacgggctagacgagctggtcgccgccctcgacgaagaagagtaaggagacggagggcttggaggcgtgggcgacgaaagagacggactttcagacgcagacgcagacgaaagggtaggagacacagaaccagacttataataagacaatggcagccagaaatagtgagaaagtgcctcataataggctactttcccatgattatatgtggccagggacgctggtcagagaactacagcagccacctagaggaccgtgtagtaaaacaggccttcggtgggggacacgcgactaccaggtggtctctaaaagtactgtacgaggagaacctcagacacttgaacttttggacctggactaacagagacttagaactggccaggtacctcaaagtgacgtggaccttttacagacaccaagatgtagactttataatatactttaacagaaagagccccatgggaggcaacatatacacagcacccatgatgcatccgggagccctaatgctcagcaaacacaagatactagtaaaaagctttaaaacaaaacccaagggcaaagcaacagttaaagtgactattaagccccccactctactagtagacaagtggtactttcaaaaggacatttgcgacatgacactgttaaacctcaatgccgttgcggctgacttgcggtttccgttctgctcaccacaaactgacaacccttgcatcaacttccaggttctgtcctcagtgtataacaacttcctctctataactgacaatagactaacaccagtcacagatgatggccaggcttattataaagcttttctagacgctgcatttaccaaagacagagactttaatgctgttaatacgtttagaacaatatctaacttttcccacccacaactagaacttccaactaaaaccaccaacacatcccaagatcaatactttaacactctagatgggtactggggagaccccatatatgtacacacacaaaatataaaacctgaccaaaaccttgataaatgcaaagaaatacttacaaacaacatgaaaaactggcataaaaaagtaaagtcagaaaacccaagtagcctgaaccacagctgctttgcccacaatgtaggcatattcagcagctcattcctatccgcaggcagactagcaccagaagttccaggcctgtacacagatgttatttacaacccatacacagacaagggaaagggaaacatgctatgggtggattactgtagcaaaggagacaacctatacaaagaaggccaaagcaagtgtctacttgccaacctacccctctggatggccacaaacggttatatagactgggtaaaaaaagaaacagataactgggttataaacactcaagccagagtactcatggtatgtccctacacttacccaaaactataccatgaaatacagccattatatggctttgtagtatactcatataactttggagagggaaaaatgccaaacggggccacatacataccctttaagtttagaaacaagtggtatccaaccatatacatgcagcaagcagtactagaagatatatccagatcgggcccctttgcacttaaacaacagatacccagcgccacacttactgccaaatacaaattcaaattcttatttggcggtaaccctacttctgaacaggttgttagagacccctgcactcagcccaccttcgaactgcccggagccagtacgcagcctccacgaatacaagtcacggacccgaaactcctcggtccccactactcattccactcgtgggacctcagacgtggctactatagcacaaagagtattaaacgaatgtcagaacacgaagaaccttctgagtttattttcccaggtcccaaaaaacccagggtcgacctcgggccaatccaacagcaagaaaggccctccgattcactccaaagagaatcgaggccgtgggagaccagcgaagaagagagcgaagcagaagtccagcaagaagagacggaggaggtgcccctcagacagcaactcctccacaacctcagagagcagcagcaactccgaaagggcctccagtgcgtcttccagcagctaataaagacgcagcagggggttcacatagacccatccctactgtag

SEQ ID NO: 222 - DNA, 660 bp, Torque teno virus
  source 1..660: mol_type = other DNA
atggcgtggtcgtggtggtggaggcgacggaaacgctggtggccgcgcagaaggaggcgatggaggagatttcgcacccgaagagctagacgagctgttccgcgccgtcgccgccgacgaagagtaaggaggcgccggtgggggaggcgaggacgtaggagacgggttttttataagagacgcagacgaaagactggcagactgtacagaaagcccaaaaagaaactagtactgactcagtggcaccccactaccgtccgcaactgctccatccgaggccttgtgcctctagtactctgcggacacactcagggcggcagaaactttgctctcaggagcgatgactaccccaagcaggggtctccttacggaggcagttttagcactacaacctggaacttgagggtcctttttgacgaacaccaaaaacaccacaacacgtggagctaccccaataaccagctagacctgggcagatacaagggctgcaccttctgcttttacagaggcaaaaagacggactacatagtaaagtttcagaggaggggaccctttaaaataaacaagtacagcagtcccatggcccatccgggcatgatgatgctagataagatgaaaatcctggtgcccagctttgataccaggcccgggggtcgctga

SEQ ID NO: 223 - DNA, 660 bp, Torque teno virus; identical to SEQ ID NO: 222
  source 1..660: mol_type = other DNA

SEQ ID NO: 224 - DNA, 660 bp, Torque teno virus
  source 1..660: mol_type = other DNA
atggcgtggtcgtggtggtggaggcgacggaaacgctggtggccgcgcagaaggaggcgatggaggagatttcgcacccgaagagctagacgagctgttccgcgccgtcgccgccgacgaagagtaaggaggcgccggtgggggaggcgaagacgtaggagacgggttttttataagagacgcagacgaaagactggcagactgtacagaaagcccaaaaagaaactagtactgactcagtggcaccccactaccgtccgcaactgctccatccgaggccttgtgcctctagtactctgcggacacactcagggcggcagaaactttgctctcaggagcgatgactaccccaagcaggggtctccttacggaggcagttttagcactacaacctggaacttgagggtcctttttgacgaacaccaaaaacaccacaacacgtggagctaccccaataaccagctagacctgggcagatacaagggctgcaccttctacttttacagagacaaaaagacagactacatagtaaagtttcagaggaggggaccctttaaaataaacaagtacagcagtcccatggcccatccgggcatgatgatgctagataagatgaaaatcctggtgcccagctttgataccaggcccgggggtcgctga

SEQ ID NO: 225 - DNA, 660 bp, Torque teno virus; identical to SEQ ID NO: 224
  source 1..660: mol_type = other DNA

SEQ ID NO: 226 - DNA, 1410 bp, Torque teno virus
  source 1..1410: mol_type = other DNA
atgtactatggctgcataggaattaattccactttaacaaccaagtatgaaaacttatttaataaactatattccaaatgctgctactttgaaacctttcaaacaatagcccagctaaatcctggctttaaagctgctaaaaagactactaatggttctggttctacagctgcaacactaggagacgcagtaactgaacttaaaaacccaaatggtactttttacacaggcaacaatagcacctttggctgctgcacatataaacccactaaacaaataggtagtaatgccaataagtggttctggcatcagttaacagccacagattcagacacactaggccaatacggccgtgcctccattcagtatatggagtaccacacaggcatttacagctcaatttttcttagcccactaagaagcaatctagaactccctacagcataccaagatgtaacatataatccactaactgacagaggtataggtaacagaatctggtaccagtacagtaccaaagaaaacactacatttaatgaaacacagtgcaaatgtgtactatcagacttgccactgtggagcatgttttatggctatgtagattttatagagtcagaactaggcatctcagcagagatacacaactttggcatagtatgtgtccagtgcccctacacgtttcccccaatgtttgacaaatccaaaccagataaaggctacgtgttctatgacaccctttttggcaacggaaagatgccagacgggagcggacacgtacccacctactggcagcagaggtggtggcccagattcagcttccagagacaagtgatgcacgacattatcctcaccgggcccttcagctacaaagatgactctgtaatgactggcataaccgcaggctacaagtttaaattctcatggggcggtgatatggtctccgaacaggtcattaaaaacccagagagaggggacggacgagactccacctatcccgatagacagcgccgcgactcacaagttgttgacccacgctccatgggcccccaatgggtgttccacacctttgactacagacgggggctttttggaaaggacgctattaagcgagtgtcagaaaaaccgacagatcctgactactttacaacaccttacaaaaaaccaagatttttccctccaacagcaggagaagaaaaactgcaagaagaagactccgctttacaggagaaaagaagcccgctctcgtcagaagaggggcagacgagggcgcaagtcctccagcagcaggtcctccagtcggagctccagcagcagcaggagctcggggagcagctcagattcctcctcagggaaatgttcaaaacccaagcgggcatacacatgaacccccgcgcatttcaggagctgtaa

SEQ ID NO: 227 - DNA, 1410 bp, Torque teno virus; identical to SEQ ID NO: 226
  source 1..1410: mol_type = other DNA

SEQ ID NO: 228 - DNA, 1410 bp, Torque teno virus
  source 1..1410: mol_type = other DNA
atgtactatgactgcataggaattaattccactttaacaaccaagtatgaaaacttatttaataaactatattccaaatgctgctactttgaaacctttcaaacaatagcccagctaaatcctggctttaaagctgctaaaaagactactaatggttctggttctacagctgcaacactaggagacgcagtaactgaacttaaaaacccaaatggtactttttacacaggcaacaatagcacctttggctgctgcacatataaacccactaaacaaataggtagtaatgccaataagtggttctggcatcagttaacagccacagattcagacacactaggccaatacggccgtgcctccattcagtatatggagtaccacacaggcatttacagctcaatttttcttagcccactaagaagcaatctagaattccctacagcataccaagatgtaacatataatccactaactgacagaggtataggtaacagaatctggtaccagtacagtaccaaagaaaacactacatttaatgaaacacagtgcaaatgtgtactatcagacttgccactgtggagcatgttttatggctatgtagattttatagagtcagaactaggcatctcagcagagatacacaactttggcatagtatgtgtccagtgcccctacacgtttcccccaatgtttgacaaatccaaaccagataaaggctacgtgttctatgacaccctttttggcaacggaaagatgccagacgggagcggacacgtacccacctactggcagcagaggtggtggcccagattcagcttccagagacaagtgatgcacgacattatcctcaccgggcccttcagctacaaagatgactctgtaatgactggcataaccgcaggctacaagtttaaattctcatggggcggtgatatggtctccgaacaggtcattaaaaactcagagagaggggacggacgagactccacctatcccgatagacagcgccgcgacttacaagttgttgacccacgctccatgggcccccaatgggtattccacacctttgactacagacgggggctttttggaaaggacgctattaagcgagtgtcagaaaaaccgacagatcctgactactttacaacaccttacaaaaaaccaagatttttccctccaacagcaggagaagaaaaactgcaagaagaagactccgctttacaggagaaaagaagcccgctctcgtcagaagaggggcagacgagggcgcaagtcctccagcagcaggtcctccagtcggagctccagcagcagcaggagctcggggagcagctcagattcctcctcagggaaatgttcaaaacccaagcgggcatacacatgaacccccgcgcatttcaggagctgtaa

SEQ ID NO: 229 - DNA, 1410 bp, Torque teno virus; identical to SEQ ID NO: 228
  source 1..1410: mol_type = other DNA

SEQ ID NO: 230 - protein, 770 aa, Torque teno virus
MAYGWWRRRRRRWRRWRPRPWRPRWRTRRRRPARRRGHRRNVRRRRRGGRWRRRYRRWKRKGRRRKKAKIIIRQWQPNYRRRCNIVGYIPVLICGENTVSRNYATHSDDTNYPGPFGGGMTTDKFTLRILYDEYKRFMNYWTASNEDLDLCRYLGVNLYFFRHPDVDFIIKINTMPPFLDTELTAPRLHPGMLALDKRARWIPSLKSIPGKKHYIKIRVGAPKMFTDKWYPQTDLCDMVLLTVYATAADIPYPFGSPLTDSVVVNFQVLQSMYDKYISILPDQKSQSKSLLSNIANYIPFYNTTQTIAQLKPFIDAGNITSGTAATTWGSYINTTKFTTTATTTYTYPGTTTNTVTMYSSNDSWYRGTVYNNQIKELPKKAAELYSKATKTLLGNTFTTEDCTLEYHGGLYSSIWLSPGRSYFETPGAYTDIKYNPFTDRGEGNMLWIDWLSKKNMNYDKVQSKCLVSDLPLWASAYGYVEFCAKSTGDQNIHMNARLLIRSPFTDPQLLVHTDPTKGFVPYSLNFGNGKMPGGSSNVPIRMRAKWYPTLFHQQEVLEALAQSGPFAYHSDIKEVSLGMKYRFKWIWGGNPVRQQVVRNPCKETHSSGNRVPRSLQIVDPKYNSPELTFHTWDFRRGLFGPKAIQRMQQQPTTTDIFSAGRKRPRRDTEVYHSSQEGEQKESLLFPPVKLLRRVPPWEDSQQEESGSQSSEEETQTVSQQLKQQLQQQQILGVKLRLLFDQVQKIQQNQDINPTLLPRGGDLASLFQIAP

SEQ ID NO: 231 - protein, 770 aa, Torque teno virus
MAYGLWRRRRRRWKRWRRRRWRRRWRTRRRRPAGRRRRRRTVRRRRRRGRWRRRYRRWRRKGRRRKKKKLIIRQWQPNYTRKCNIVGYMPVIMCGENTVSRNYATHSDDTNYPGPFGGGMTTDKFTLRILYDWYKRFMNYWTASNEDLDLCRYLGVNLYFFRHPDVDFIIKINTMPPFLDTELTAPSIHPGMLALDERARWIPSLKSRPGKKHYIKIRVGAPKMFTDKWYPQTDLCDMVLLTVYATAADMQYPFGYPLTDSVVVNFQVLQSMYDKYISILPDQKSQRESLLSNIANYIPFYNTTQTIAQLKPFIDAGNITSGTTATTWGSYINTTKFTTTATTTYTYPGTTTNTVTMLTSNDSWYRGTVYNNQIKELPKKAAELYSKATKTLLGNTFTTEDCTLEYHGGLYSSIWLSPGRSYFETPGAYTDMKYNPFTDRGEGNMLWIDWLSKKNMNYDKVQSKCLVSDLPLWAAAYGYLEFCSKSTGDTNIHMNARLLIRSPFTDPQLIAHTDPTKGFVPYSLNFGNGKMPGGSSNVPIRMRAKWYPTLFHQQEVLEALAQSGPFAYHSDIKKVSLGIKYRFKWIWGGNPVRQQVVRNPCKEPHSSVNRVPRSIQIVDPKYNSPELTIHAWDFRRGFFGPKAIQRMQQQPTATEFFSAGRKRPRRDTEVYQSDQEKEQKESSLFPPVKLLRRVPPWEDSEQEQSGSQSSEEETHTVSQQLKQQLQQQRILGVKLRVLFHQVHKIQQNQHINPTLLPRGGALASLSQIAP

SEQ ID NO: 232 - protein, 770 aa, Torque teno virus
MAYGLWHRRRRRWRRWKRTPWKRRWRTRRRRPARRRGRRRNVRRRRRGGRWRRRYRRWKRKGRRRKKAKIIIRQWQPNYRRRCNIVGYIPVLICGENTVSRNYATHSDDTNYPGPFGGGMTTDKFTLRILCDEYKRFMNYWTASNEDLDLCRYLGVNLYFFRHPDVDFIIKINTMPPFLDTELTAPSIHPGMLALDKRARWIPSLKSRPGKKHYIKIRVGAPKMFTDKWYPQTDLCDMVLLTVYATTADMQYPFGSPLTDSVVVNFQVLQSMYDKTISILPDEKSQREILLNKIASYIPFYNTTQTIAQLKPFIDAGNVTSGATATTWASYINTTKFTTATTTTYAYPGTNRPPVTMLTCNDSWYRGTVYNTQIQQLPIKAAKLYLEATKTLLGNNFTNEDYTLEYHGGLYSSIWLSPGRSYFETTGAYTDIKYNPFTDRGEGNMLWIDWLSKKNMNYDKVQSKCLVRDLPLWAAAYGYVEFCAKSTGDKNIYMNARLLIRSPFTDPQLLVHTDPTKGFVPYSLNFGNGKMPGGSSNVPIRMRAKWYPTLFHQQEVLEALAQSGPFAYHSDIKKVSLGMKYRFKWIWGGNPVRQQVVRNPCKETHSSGNRVPRSLQIVDPKYNSPELTFHTWDFRRGLFGPRAIQRMQQQPTTTDILSAGRKRPRKDTEVYHPSQEGEQKESLLFPPVKLLRRVPPWEDSQQEESGSQSSEEETQTVSQQLKQQLQQQQILGVKLRLLFDQVQKIQQNQDINPTLLPRGGDLASLFQIAP

SEQ ID NO: 233 - protein, 770 aa, Torque teno virus
MAYGWWRRRRRRWRRWRRRPWRRRWRTRRRRPARRRGRRRNVRRRRRGGRWRRRYRRWKRKGRRRKKAKIIIRQWQPNYRRRCNIVGYIPVLICGENTVSRNYATHSDDTNYPGPFGGGMTTDKFTLRILYDEYKRFMNYWTASNEDLDLCRYLGVNLYFFRHPDVDFIIKINTMPPFLDTELTAPSIHPGMLALDKRARWIPSLKSRPGKKHYIKIRVGAPKMFTDKWYPQTDLCDMVLLTVYATAADMQYPFGSPLTDSVVVNFQVLQSMYDEKISILPDQKSQRESLLTSIANYIPFYNTTQTIAQLKPFIDAGNVTSGTTATTWGSYINTTKFTTTATTTYTYPGTTTTTVTMLTSNDSWYRGTVYNNQIKDLPKKAAELYSKATKTLLGNTFTTEDYTLEYHGGLYSSIWLSPGRSYFETPGAYTDIKYNPFTDRGEGNMLWIDWLSKKNMNYDKVQSKCLISDLPLWAAAYGYVEFCAKSTGDQNIHMNARLLIRSPFTDPQLLVHTDPTKGFVPYSLNFGNGKMPGGSSNVPIRMRAKWYPTLFHQQEVLEALAQSGPFAYHSDIKKVSLGMKYRFKWIWGGNPVRQQVVRNPCKETHSSGNRVPRSLQIVDPKYNSPELTFHTWDFRRGLFGPKAIQRMQQQPTTTDIFSAGRKRPRRDTEVYHSSQEGEQKESLLFPPVKLLRRVPPWEDSQQEESGSQSSEEETQTVSQQPKQQLQQQRILGVKLRLLFNQVQKIQQNQDINPTLLPRGGDLASLFQVAP

SEQ ID NO: 234 - protein, 770 aa, Torque teno virus
MAYGWWRRRRRRWRRWRRRPWRRRWRTRRRRPARRRGRRRNVRRRRRGGRWRRRYRRWKRKGRRRKKAKIIIRQWQPNYRRRCNIVGYIPVLICGENTVSRNYATHSDDTNYPGPFGGGMTTDKFTLRILYDEYKRFMNYWTASNEDLDLCRYLGVNLYFFRHPDVDFIIKINTMPPFLDTELTAPSIHPDMLALDKRARWIPSLKSRPGKKHYIKIRVGAPKMFTDKWYPQTDLCDMVLLTVYATTADMQYPFGSPLTDSVVVNFQVLQSMYDENISILPTEKSKRDVLHSTIANYTPFYNTTQIIAQLRPFVDAGNLTSASTTTTWGSYINTTKFNTTATTTYTYPGSTTTTVTMLTCNDSWYRGTVYNNQISKLPKQAAEFYSKATKTLLGNTFTTEDHTLEYHGGLYSSIWLSAGRSYFETPGAYTDIKYNPFTDRGEGNMLWIDWLSKNNMNYDKVQSKCLISDLPLWAAAYGYVEFCAKSTGDQNIHMNARLLIRSPFTDPQLLVHTDPTKGFVPYSLNFGNGKMPGGSSNVPIRMRAKWYPTLFHQQEVLEALAQSGPFAYHSDIKKVSLGMKYRFKWIWGGNPVRQQVVRNPCKETHSSGNRVPRSLQIVDPKYNSPELTFHTWDFRRGLFGPKAIQRMQQQPTTTDIFSAGRKRPRRDTEVYHSSQEGEQKESLLFPPVKLLRRVPPWEDSQQEESGSQSSEEETQTVSQQLKQQLQQQRILGVKLRLLFNQVQKIHQNQDINPTLLPRGGDLASLFQIAP

SEQ ID NO: 235 - protein, 770 aa, Torque teno virus
MAYGWWRRRRRRWRRWRRRPWRRRWRTRRRRPARRRGRRRNVRRRRRGGRWRRRYRRWKRKGRRRKKAKIIIRQWQPNYRRRCNIVGYIPVLICGENTVSRNYATHSDDTNYPGPFGGGMTTDKFTLRILYDEYKRFMNYWTASNEDLDLCRYLGVNLYFFRHPDVDFIIKINTMPPFLDTELTAPSIHPGMLALDKRARWIPSLKSRPGKKHYIKIRVEAPKMFTDKWYPQTDLCDMVLLTVYATTADMQYPFGSPLTDSVVVNFQVLQSMYDQNISILPTEKSKRTQLHDNITRYTPFYNTTQTIAQLKPFVDAGNVTPVSPTTTWGSYINTTKFTTTATTTYTYPGTTTTTVTMLTCNDSWYRGTVYNNQISQLPKKAAEFYSKATKTLLGDTFTTEDYTLEYHGGLYSSIWLSAGRSYFETPGVYTDIKYNPFTDRGEGNMLWIDWLSKKNMNYDKVQSKCLISDLPLWAAAYGYVEFCAKSTGDQNIHMNAKLLIRSPFTDPQLLVHTDPTKGFVPYSLNFGNGKMPGGSSNVPIRMRAKWYPTLFHQQEVLEALAQSGPFAYHSDIKKVSLGMKYRFKWIWGGNPVRQQVVRNPCKETHSSGNRVPRSLQIVDPKYNSPELTFHTWDFRRGLFGPKAIQRMQQQPTTTDIFSAGRKRPRRDTEVYHSSQEGEQKESLLFLPVKLLRRVPPWEDSQQEESGSQSSEEETQTVSQQLKQQLQQQRILGVKLRLLFNQVQKIQQNQDINPTLLPRGGDLASLFQIAP

SEQ ID NO: 236 - protein, 765 aa, Torque teno virus
MAYGWWRRRRRRWKRWRRRPRWRRPWRTRRRRPARRRGRRRTVRRRERGRWRRRYRRWRKKGKRRIKKKLIIRQWQPNYTRKCDILGYMPVIMCGENTLIRNYATHANDCYWPGPFGGGMATQKFTLRILYDDYKRFMNYWTSSNEDLDLCRYRGVTLYFFRHPDVDFIILINTTPPFVDTEITGPSIHPGMMALNKRARFIPSLKTRPGRRHIVKIRVGAPKLYEDKWYPQSELCDMPLLTVYATAADMQYPFGSPLTDTPVVTFQVLRSMYNDALSILPSNFEQDDNAGQKLYNEISSYLPYYNTTETIAQLKRYVENTEKISTTPNPWQSNYVNTITFTTAQSITTTTPYTTFSDSWYRGTVYKNAITKVPLAAAKLYETQTKNLLSPTFTGGSEYLEYHGGLYSSIWLSAGRSYFETKGAYTDICYNPYTDRGEGNMLWIDWLSKGDSRYDKARSKCLIEKLPMWAAVYGYAEYCAKATGDSNIDMNARVVMRCPYTVPQMIDTSDPLRGFIPYSFNFGKGKMPGGTNQVPIRMRAKWYPCLFHQKEVLEAIGQSGPFAYHSDQKKAVLGLKYRFHWIWGGNPVFPQVVRNPCKDTQGSTGPRKPRSVQIIDPKYNTPELTIHAWDFRRGFFGPKAIKRMQQQPTDAELLPPGRKRSRRDTEVLQSSQERQKESLLLQQLHLQGRVPPWESLQGLQTETESQKEHEGTLSQQIREQVQQQKLLGRQLREMFLQLHKILQNQHVNPTLLPRDQGLIWWFQIQ

SEQ ID NO: 237 - protein, 765 aa, Torque teno virus
MAYGWWRRRRRRWKRWRRRPRWRRPWRTRRRRPAGRRGRRRTVRRRRRGRWRRRYRRWRKKGRRRRKKKLIIRQWQPNYTRKCNIVGYMPVIMCGENTLIRNYATHAYNCSWPGPFGGGMATQKFTLRILYDDYKRFMNYWTSSNEDLDLCRYRGATLYFFRDPDVDFIILINTTPPFVDTEITGPSIHPGMLALNKRARFIPSLKTRPSRRHIVKIRVGAPKLYEDKWYPQSELCDMPLLTVYATATDMQYPFGSPLTDTPIVTFQVLRSMYNDALSILPSNFEGDDSAGAKLYKQISEYIPYYNTTETIAQLKGYVENTEKTQTTPNPWQSKYVNTKPFDTAQTITNQKPYTPFADTWYRGTAYKEEIKNVPLKAAELYELHTTHLLSTTFTGGSKYLEYHGGLYSSIWLSAGRSYFETKGAYTDICYNPYTDRGEGNMVWIDWLVKTDSRYDKTRSKCLIEKLPLWAAVYGYAEYCAKATGDSNIDMNARVVIRSPYTTPQMIDTNDSLRGFIVYSFNFGKGKMPGGTNQVPIRMRAKWYPCLFHQKEVLEAIGQSGPFAYHSDQKKAVLGLKYRFHWIWGGNPVFPQVVRNPCKDTQGSTGPRKPRSVQIIDPKYNTPELTIHAWDFRRGFFGPKAIKRMQQQPTDAELLPPGRKKSRRDTEVLQSSQERQKESLLFQQLQLQRRVPPWESSQGSQTETESQKEQEGTLSQQLREQLQQQKLLGRQLREMFLQIHKILQNQQVNPILLPRDQALISWFQIQ

SEQ ID NO: 238 - protein, 765 aa, Torque teno virus
MAYGWWRRRRRRWKRWRRRPRWRRRWRTRRRRPAGRRRRRRTVRRRRRGRWRSRYRRWRRKGRRRRKEKLIIRQWQPNYTRKCNIVGYMPVIMCGENTVIRNYATHTYDCSWPGPFGGGMATQKFTLRILYDDYKRFMNYWTSSNEDLDLCRYRGATLYFFRDPDVDFIILINTTPPFVDTEITGPSIHPGMLALNKRARFIPSLKTRPGRRHIVKIKVGAPRMYEDKWYPQSELCDMPLLTIYATATDMQHPFGSPLTDTPVVTFQVLRSMYNDALSILPSNFEDDSSPGAALYKQISEYIPYYNTTETIAQLKRYVENTEKTQTTLNPWQSRYVNTTLFNTAETIANQKPYTKFADTWYRGTAYKDAIKDIPLKAAELYVNQTKYLLSTTFTGGSKYLEYHGGLYSSIWLSAGRSYFETKGAYTDICYNPYTDRGEGNMVWIDWLSKTDSKYDKTRSKCLIEKLPLWASVYGYAEYCAKATGDSNIDMNARVVIRCPYTTPQMIDTTDPTRGFIVYSFNFGKGKMPGGSNEVPIRMRAKWYPCLFHQKEVLEAIGQSGPFAYHSDQKKAVLGLKYKFHWIWGGNPVFPQVIKNPCKNTQFSTGPRKPRSLQIIDPNYNTPKLTIHAWDFRLGFFGPKAIKRMQQQPTDAELLPPGRKRSRRDTEVLQSSQERQKGNLLFQQFQLQRRVPPWESSQGSQTGTQSQKEQEGTLSQQLREQLQQQKLLGRQLREMFLQLHKIQQNQHVNPTLLPRDQALICWFQIQ

SEQ ID NO: 239 - protein, 770 aa, Torque teno virus; identical to SEQ ID NO: 233

SEQ ID NO: 240 - protein, 733 aa, Torque teno virus
TAWWWGRWRRRWRPRYRRRTWRVRRRRPRRTFRRRRRGRYVSRRRRRRYYRRRLRRGRRRGRRKRHRQTLVLRQWQPDIVRHCKITGWMPLIICGSGSTQNNFITHMDDFPPMGYSFGGNFTNLSFSLEGIYEQFLYHRNRWSRSNHDLDLARYKGTTLKLYRHHTLDYIVSYNRTGPFQISDMTYLSTHPALMLLQKHRIVVPSLLTKPKGKRSIKVRIKPPKLMLNKWYFTKDICSMGLFQLQATACTLYNPWLRDTTKSPVIGFRVLKNSIYTNLSNLPEHDQTRQAIRRKLHPDSLTGSTPYQKGWEYSYTKLMAPIYYQANRNSTYNWLNYQTNYAQTFTKFKEKMNENLALIQKEYSYHYPNNVTTDLIGKNTLTHDWGIYSPYWLTPTRISLDWETPWTYVRYNPLADKGIGNAVYAQWCSEQTSKLDTKKSKCIMKDLPLWCIFYGYVDWIIKSTGVSSAVTDMRVAIISPYTEPALIGSSPDVGYIPVSDTFCNGDMPFLAPYIPVGWWIKWYPMIAHQKEVFEAIVNCGPFVPRDQTTPSWEITMGYKMDWLWGGSPLPSQAIDDPCQKPTHELPDPDRHPRMLQVSDPTKLGPKTVFHKWDWRRGMLSKRSIKRVQEDSTDDEYVAGPLPRKRNKFDTRAQGLQTPEKESYTLLQALQESGQETSSEDQEQAPQEKEGQKEALMEQLQLQKQHQRVLKRGLKLLLGDVLRLRRGVHWDPLLS

SEQ ID NO: 241 - protein, 733 aa, Torque teno virus
TAWWWGRWRRRWRPRYRKRTWRLRRRRPRRTFRRRRRRQYVSRRRRRRYYRRRLRRGRRRGRRKRHRQTLVLRQWQPDVVRHCKITGWMPLIICGSGSTQNNFITHMDDFPPMGYSFGGNFTNLTFSLEGIYEQFLYHRNRWSRSNHDLDLARYKGTTLKLYRHHTLDYIVSYNRTGPFQISDMTYPSTHPALMLLQKHRIVVPSVLTKPKGKRSIKVRIKPPKLMLNKWYFTKDICSMGLFQLQATACTLYNPWLRDTTKSPVIGFRVLKNSIYTNLSNLPDHEGSREAIRKKLHPQSLTGHSPNQKGWEYSYTKLMAPIYYSANRNSTYNWLNYQDNYVATYTKFKVKMTDNLQLIQKEYSYHYPNNTTTDLIKNNTLTHDWGIYSPYWLTPTRISLDWETPWTYVRYNPLADKGIGNAVYAQWCSEQTSKLDPKKSKCIMRDLPLWCIFYGYVDWIVKSTGVSSAVTDMRVAIRSPYTEPALIGSTEDVGFIPVSDTFCNGDMPFLAPYIPVGWWIKWYPMIAHQKEVFEQIVNCGPFVPRDQTTPSWEITMGYKMDWLWGGSPLPSQAIDDPCQKPTHELPDPDRHPRMLQVSDPTKLGPKTVFHRWDWRRGMLSKRSIKRVQEDSTDDEYVAGPLPRKRNKFDTRAQGLQSPEKESYTLLQALQESGQESSSEDQEQAPQEKEGQKEALMEQLQLQKQHQRVLKRGLKLLLGDVLRLRRGVHWDPLLS

SEQ ID NO: 242 - protein, 733 aa, Torque teno virus
TAWWWGRWRRRWRPRYRRRTWRVRRRRPRRTFRRRRRGRYVSRRRRRRYYRRRLRRGRRRGRRKRHRQTLVLRQWQPDVLRRCKITGWMPLIICGSGSTQNNFITHMDDFPPMGYSYGGNFTNLTFSLEGIYEQFLYHRNRWSRSNHDLDLARYKGTTLKLYRHHTLDYIVSYNRTGPFQISDMTYLSTHPALMLLQKHRIVVPSLLTKPKGKRSIKVRIKPPKLMLNKWYFTKDICSMGLFQLQATACTLYNPWLRDTTKSPVIGFRVLKNSIYTNLSNLPDHEGAREAIRKKLHPQSLTGSVPNQKGWEYSYTKLMAPIYYQAIRNSTYNWLNYQQNYSQTYQTFKQKMQDNLQLIQKEYMYHYPNNVTTDILGKNTLTHDWGIYSPYWLTPTRISLDWETPWTYVRYNPLADKGIGNAVYAQWCSEQTSNLDTKKSKCIMKDLPLWCIFYGYVDWVVKSTGVSSAVTDMRVAIISPYTEPALIGSSPEVGYIPVSDTFCNGDTPFLAPYIPVGWWIKWYPMIAHQKEVFEAIVNCGPFVPRDQTTPSWEITMGYKMDWLWGGSPLPSQAIDDPCQKPTHELPDPDRHPRMLQVSDPTKLGPKTVFHKWDWRRGMLSKRSIKRVQEDSTDDEYVAGPLPRKRNKFDTRAQGLQSPEKESYTLLQALQESGQETSSEDQEQAPQEKEGQKEALMEQLQLQKQHQRVLKRGLKLLLGDVLRLRRGVHWDPLLS

SEQ ID NO: 243 - protein, 785 aa, Torque teno virus
MAQGRRRYRRGWQRRVYLRRRRRRRRKRLVLTQWHPAVRRKCTITGYMPVVWCGHGRASYNYAWHSDDCIKQPWPFGGSLSTVSFNLKVLYDENQRGLNRWTYPNDQLDLGRYKGCKLTFYRTKNTNYPGPFGGGMTTDKFTLRILYDEYKRFMNYWTASNEDLDLCRYLGVNLYIFRHPDVDFIIKINTMPPFLDTEITAASIHPGILALDKRARWIPSLKSRPGKKHYIKIRVGAPKMFTDKWYPQTDLCDMVLLTIYATAADMQYPFGSPLTDTVVVNFQVLQSMYDENISILPDQKTQREKLLTSISNYIPFYNTTQTIAQLKPFVDAGNKVSGTTTTTWASYINTTRFTTTATTTYTYPGSTTNTVTMLTSNDSWYRGTVYNNQIKNLPKQAAELYSKATKTLLGNTFTTEDYTLEYHGGLYSSIWLSPGRSYFETPGAYTDIKYNPFTDRGEGNMLWIDWLSKKNMNYDKVQSKCLVSDLPLWAAAYGYVEFCAKSTGDQNIHMNARLLIRSPFTDPQLLVHTDPTKAFVPYSLNFGNGKMPGGSSNVPIRMRAKWYPTLFHQQEVLEALAQSGPFAYHSDIKKVSLGIKYRFKWIWGGNPVRQQVVRNPCKEPHSSGNRVPRSIQIVDQKYNSPELTIHSWDFRRGFFGPKAIQRMQQQPTATEFFSAGRKRPRRDTEVYQSDQEKEQKESSLFPPVKLLRRVPPWEDSDRKQSGSQSSEEETQTVSQQLKQQLQQQRILGVKLRLLFYQIQRIQQNQDINPTLLPRGGDLASLFQIA

SEQ ID NO: 244 - protein, 748 aa, Torque teno virus
MAWTWWWQRRRRRWPWRRRRWRRLRTRRPRRLVRRRRKRYRVRRRRRWGRRRGRRTYLRRGLKKRKRRKKLRLTQWNPSTIRGCTIKGMAPLIVCGHTMAGNNFAIRMEDYVSQIKPFGGSFSTTTWSLKVLWDEHTRFHNTWSYPNTQLDLARFKGVTFYFYRDKDTDFIITYSSVPPFKIDKYSSAMLHPGMLMQRKKKILLPSFTTRPRGRKKVKVHIKPPVLFEDKWYTQQDLCDVNLLSLAVSAASFRHPFCPPQTDNICITFQVLKDKYYTQMSVTPDTAGTKKDDEILDHLYSTAEYYQTVHTQGIINKTQRVAKFSTSNNTLGDQSEISLYLNQPTTTNIGNTLSTGHNSVYGFPSYNPQKDKLRKIADWFWTQEANKENVVTGSYSMPTNKAVGYHLGKYSPIFLSSYRTNLQFRTAYTDVTYNPLNDKGKGNEIWVQYVTKPDTVFNPTQCKCHVIDLPLWSAFHGYIDFVQSELGIQEEILNIAIIVVICPYTKPKLVHETNPKQGFVFYDTQFGDGKMPEGSGLVPIYYQNRWYPRIKFQSQVVHDFILTGPFSYKDDLKSTVLTVEYKFKFLWGGNMIPEQVIRNPCKTEGHDLPHTSRLHRDLQVVDPHTVGPQWALHTWDWRRGLFGSEAIKRVSEQQVHDELYYPPSKKPRFLPPISGLQEQERDYSSQEEKEQSSSEEETDPKKKEQKQQQRLHLQFQEQQRLGNQLRLIFRELQKTQAGLHLNPMLSNRL

SEQ ID NO: 245 - protein, 726 aa, Torque teno virus
MAWGWWKRRRRWWFRKRWTRGRLRRRWPRPARRRPRRRRVRRRRRWRRGRPRRRLYRRYRRKKRRRRKPKIILKQWQPDIVKRCYIVGYIPAIICGAGTWSHNYTSHLLDIIPKGPFGGGHSTMRFSLKVLFEEHLRHLNFWTRSNQDLELVRYFRCSFRFYRDQHTDYLVHYNRKTPLGGNRLTAPSLHPGVQMLSKNKIIVPSYDTKPKGKSYVKVTIAPPTLLTDKWYFAKDVCDTTLVNLDVVLCNLRFPFCSPQTDNPCITFQVLHSIYNDFLSIVDTQEYKNNFVTTLSTKLGTTWGSRLNTFRTEGCYSHPKLPKKQVTAANDSTYFTQPDGLWGDAVFETKDTTIITKNMESYATSAKQRGVNGDPAFCHLTGIYSPPWLTPGRISPETPGLYTDVTYNPYADKGVGNRIWVDYCSKKGNKYDNTSKCLLEDMPLWMVTFGYVDWVKKETGNWGIPLWARVLIRSPYTVPKLYNEADPSYGWVPISYYFGEGKMPNGDMYVPFKVRMKWYPSMWNQEPVLNDLAKSGPFAYKDTKTSVTVTTKYKFTFNFGGNPVPSQIVQDPCTQPTYDIPGTGNLPRRIQVIDPKVLGPHYSFHRWDFRRGLFGQQAIKRVSEQQTTSEFLFSGPKRPRIDQGPYIPPEKGSDSLQRESRPWSTSESEAETEAPSEEEPENQEEQVLQLQLRQQLREQRKLRQGIQCLFEQLITTQQGVHKNPLLE

SEQ ID NO: 246 - protein, 763 aa, Torque teno virus
MAYGWWARRRRRWRRWKRRPWRRRWRTRRRRPRRRYRRRRHVRRRRRGRWRRRYRKWRRKGRRRGKKKIIIRQWQPNYRRRCNIIGYMPVLICGNNTVSRNYATHSDDSYLPGPFGGGMTTDKFTLRILYDEYCRFMNYWTASNEDLDLCRYRGCTLWFFRHPDVDFIILINTMSPFLDTQLTGPSIHPGLMALNKRARWIPSLKSRPGRKHVVKIRVGAPRMFTDKWYPQSDLCDLPLLTIFASAADMQYPFGSPLTDSVVVGFQVLQSMYNDCLSILPENFNGNGKGKALHDNITKYLPNYNTTQTLAQLKPYIDNTSTGSTNNWSSYVNTSKFTTASKTITTSAEGPYYTFADTWYRGTAYNNSITNVPLQAAQLYHDTTKKLLGTTFTGGSPYLEYHGGLYSSIWLSAGRSYFETKGTYTDITYNPFTDRGQGNMVWIDWVSKYDSVYSKTQSKCLIENLPLWASVYGYAEYCSKSTGDTNIEQNCRVVIRSPFTNPQLLDHNNPLRGYVPYSINFGNGKMPGGSSQVPIRMRSKWYPTLFHQKEVLEAIAQAGPFAYHSDQMKVSLGMKYAFKWVWGGNPVSQQVVRNPCKDTGVSSGNRVPRSVQIVDPKYNTPELAIHAWDFRRACLAQKLLRECKQNRTLLNFFRQGEKDTGETQKLYSPAKKNNKKKTYFSSQSSSSDQSPVGGVGPKPKRGRGGPTRDADTLPAAPAAAQGAAAHGGPTPSPVPTITTGPTKHTYRPYLFARGAGVTSLFQTA

SEQ ID NO: 247 - protein, 760 aa, Torque teno virus
MAWWGRWRRWPRRRWRRWRRRRRRRLPTRRTRRAVRGLGRRPRKTVRRRRRRPRRTYRRGWRRRRYIRRRRGRRKKLTLTMWNPNIVRRCNIEGGLPLILCGENRAAFNYAYHSEDYTEQPFPFGGGMSTTTFSLRGLYDQYTKHMNRWTFSNDQLDLARYRGCKFRFYRHPTCDFIVHYNLVPPLKMNQFTSPNTHPGLLMLTKHKIIIPSFLTRPGGRRFVKIRLPPPKLFEDKWYTQQDLCKQPLVTLTATAASLRYPFCSPQTNNPNCTFQVLRKNYHKVIGTSSTNSEDVTPFENWLYNTASHYQTFATEAQVGRIPSFNPDGTKNTKESEWQNYWSKKGEPWNPNSSYPHTTTNQMYKIPFDSNYGFPTYKPIKEYMLQRRAWSFKYETDNPVSKKIWPQPTTTKPTIDYYEYHAGWFSNIFIGPNRHSLQFQTAYVDTTYNPLNDKGKGNKIWFQYHSKVNTDLRDRGIYCLLEDMPLWSMTFGYSDYVSTQLGPNVDHETQGLVCIICPYTEPPMYDKTNPNSGYVAYDTNFGNGKMPSGRSQVPVYWQCRWRPMLWFQQQVLNDISKSGPYAYRDELKNCCLTAYYNFIFDWGGDMYYPQVIKNPCADSGLVPGTSRFTREVQVVSPLSMGPQYILHLFDQRRGFFSSNALKRMQQQQEFDESFTVKPKRPKLSTAAHVEQQEEDSSSRERKSGSSQEEVQEEVLQTPEIQLHLQRNIREQLHIKQQLQLLLLQLFKTQANIHLNPRFISP

SEQ ID NO: 248 - protein, 772 aa, Torque teno virus
MAWRRWRWRPWWRRRRRRRWRRRRRRPRRRRPYRRRRPRRVRRRRGRWRRAYRRWGRRRRRRRHKKKLVLTQWQPAVVKRCLIVGFDPLIICGINRTIFNYTTHSEDFTFNNDSFGGGLCTAQYTLRILFQEKLAQHNFWSASNEDLDLARYLGATIVLYRHPTVDFLVRIRTSPPFEDTDMTAMTLHPGMMMLAKKTIKIPSLKTRPSRKHVVRIRVGAPKLFEDKWYPQNELCDVTLLTIQATTADFQYPFGSPLTNSPCCNFQVLNSNYDNAHSILNLSNEPTNKWHTYRNNCYKFLLEQYSYYNTKQVVAQLKYKWNPNQNPTMPNTSNASLSKKPDDLTKTKTTNEYPHWDTLYGGLAYGHSTVTPGTTSSPTDLKTQMLTGNEFYTTAGKKLIDTFHPIPYYENGSSKANTNIFDYYTGMYSSIFLSSGRSNPEVKGSYTDISYNPLTDKGVGNMIWIDWLTKGDTVYDPKKSKCLLSDFPLWSLCYGYPDYCRKQTGDSGIYYDYRVLIRCPYTYPQLIKHNDKYFGFVVYSENFGLGRLPGGNPNPPTRMRLHWYPNMFHQTEVLECIAQSGPFAYHGDERKAVLTAKYKFRWKWGGNPVFQQVLRDPCTGGAVAPHTSRHPRAIQVHDPKYQAPEYLFHKWDFRRGLFSTKGIKRVSEQPVHDEYFTGSSKRPKKDTNPSPQGEEQKEGSRFRVPELRPWLPSSQETQSQSEQEETAPKTVQEQLQEQLQQQQLMGIQLRNVCLQLARVQAGHSLHPVFQCHA

SEQ ID NO: 249 - protein, 426 aa, Torque teno virus
MAWGWWRRRRKWWWRRRFARSRLRRRRIRRPRRRTRRRTVRRRRQWRRGRPRRRLFKRKRRFKRRRRKAKIKITQWQPSSVKRCFVIGYFPLVICGPGRWSENFTSHIEDKISKGPFGGGHSTSRWSLKVLYEEFQRHHNFWTRSNKDLELVRFFGSSWRFYRHEDTDYIVYYSRKAPLGGNLLTAPSLHPGAAMLSKHKIVVPSFKTRPGGKPTVKINIKPPTTLIDKWYFQKDICDTTFLNLNVVLCNLRFPFCSPQTDNICVTFQILHEVYHNYISITAKELLTGTEWRQYYKNFLNAALPNDRSVNKLNTFSTEGAYSHPQIKKHTENITGSGDKYFRKKDGLWGDAIHITDQQNRTEVIDLILKNAENYLKKVQQEYQGQENLKNLIHPVFCQYVGIFGQPTTKLPQNKPRNSRPVQRHNI

SEQ ID NO: 250 - protein, 739 aa, Torque teno virus
MSWWGWRRRWWWKPRRRWRRRRARRPRRLPRRRYRRPTRRYRGRRVRRRRAGGWRGRRRYSRRYSRRLTVRRKKKKLTLKIWQPQNIRRCKIRGLLPLLICGHTRSAFNYAIHSDDKTPQQQSFGGGLSTVSFSLKVLFDPNQRGLNRWSASNDQLDLARYTGCTFWFYRHKKTDFIVQYDVSAPFKLDKNSCPSYHPFMLMKAKHKVLIPSFDTKPKGREKIKLRIQPPKMFIDKWYTQEDLCPVILVTLVATAASFTHPFCSPQTANPCITFQVLKEFYYQAMGYGTPETTMSTIWNTLYTTSTYWQSHLTPQFVRMPKNNPDNTANTEANKFNEWVDKTFKTGKLVKYNYNQYKPDIEKLTLLRQYYFRWETQHTGVAVPPTWTTPTTDRYEYHVGMFSPIFLTPYRSAGLDFPYAYADVTYNPLTDKGVGNRMWYQYNTKIDTQFDAKCCKCVLEDMPLYAMAFGHADFLEQEIGEYQDLEANGYVCVISPYTKPPMFNKHNPQQGYVFYDSQWGNGKWIDGTGFVPVYWLTRWRVELLFQKQVLSDLAMSGPFSYPDELKNTVLTAKYRFDFKWGGNLFHQQTIRNPCKPEETSTGRIPRDVQVVDPVTMGPRFVFHSWDWRRGFLSDRALKRMFEKPLDFEGFTATPKRPRILPPTEGQLAREQKEQEESSDSQEESSLTPLEEVPQETKLRLHLRKQLREQRSIRHQLRTMFQQLVKTQAGLHLNPLLSSQL

SEQ ID NO: 251 - protein, 666 aa, Torque teno virus
MWNPSTIRACNIKGAINLVMCGHTQAGRNYAIRSEDFYPQIQSFGGSFSTTTWSLRVLFDEYQKFHNFWTYPNTQLDLCRYKYAIFTFYRDPKVDYIVIYNTNPPFKINKYSSPFLHPGLMMLQKKKILIPSFQTKPGGKSRIKVKIKPPALFEDKWYTQQDLCPVNLLSLAVSACSFIHPFCSPESDTICMTFQVLREFYYTHLTVTPTTTTSTPEKDKKIFNDQLYSNANFYQSLHASAFLNIAQAPAIHGHNGIPNNSRYLSSTGTETSFRTGNNSIYGQPNYKPIPEKLTEIRKWFFKQATTPNEIHGTYGKPTYDAVDYHLGKYSPIFLSPYRTNTQFPTAYMDVTYNPNVDKGKGNKIWLQSVTKETSDFDSRSCRCIIENLPMWAMVNGYSDFAESELGSEVHAVYVCCIICPYTKPMLYNKTNPAMGYIFYDTLFGDGKLPSGPGLVPFYWQSRWYPKLAWQQQVLHDFYLCGPFSYKDDLKSFTINTTYKFKFLWGGNMIPEQVIKNPCKTTDPTYTLSDRQRRDLQVVDPITMGPQWEFHTWDWRRGLFGQNALRRVSEKPGDDAEYYAPPKKPRFFPPTDLEEQEKDSDSQEETRLLFHPSPPRSQEEIQQEQQRDIHLRLGQQLRIRQQLQQVFLQVLKTQANLHINPLFLNQQ

SEQ ID NO: 252 - protein, 745 aa, Torque teno virus
MAWGWWRRWRRWPTRRWRRRRRRRPVRRTRARRPARRYRRRRTVRTRRRRWGRRRYRRGWRRRTYVRKGRHRKKKKRLVLRQWQPATRRRCTITGYLPIVFCGHTKGNKNYALHSDDYTPQGQPFGGALSTTSFSLKVLYDQHQRGLNKWSFPNDQLDLARYRGCKFYFYRTKQTDWVGQYDISEPYKLDKYSCPNYHPGNMIKAKHKFLIPSYDTNPRGRQKIIVKIPPPDLFVDKWYTQEDLCDVNLVSFAVSAASFLHPFGSPQTDNPCYTFQVLKEFYYQAIGFSATEEKIQNVFNILYENNSYWESNITPFYVINVKKGSNTAQYMSPQISDADFRNKVNTNYNWYTYNAKTHKEKLKTLRQAYFKQLTSEGPQHTSSHAGYATQWTTPSTDAYEYHLGMFSTIFLAPDRPVPRFPCAYQDVTYNALMDKGVGNHVWFQYNTKADTQLILTGGSCKAHIENIPLWAAFYGYSDFIESELGPFVDAETVGLICVICPYTKPPMYNKTNPMMGYVFYDRNFGDGKWTDGRGKIEPYWQVRWRPEMLFQETVMADIVQTGPFSYKDELKNSTLVCKYKFYFTWGGNVMFQQTIKNPCKTDEQPTDSGRHPRGIQVADPEQMGPRWVFHSFDWRRGYLSEKALKRLQEKPLDYDEYFTQPKRPRMFPPTESAEGEFREPEKGSYSEEERSQASAEEQTKEATVLLLKRRLREQQQLQQQLQFLTREMFKTQAGLHLNPMLLNQR

SEQ ID NO: 253 - protein, 151 aa, Torque teno virus
MRFSRIYRPKKGPLPLPLVRAEQKKQPSDMSWRPPLHNGAGIERQFFEGCFRFHASCCGCGNFVTHITLLAARYGFTGGPTPPGGPGALPSLRRALPPPPAPQDQAEPELWRGRGGGGEGNAGGRAEGGDGEGYEPEELEELFRAAAADDE

SEQ ID NO: 254 - protein, 742 aa, Torque teno virus
MAFRWWWWRRRPQRRWTRRRWRRLRTRRPRRTVRRRRRRPRVRRRRWGRRRGRRRLYRRTYRKRRKRRKKMTLKMWNPSTIRACNIRGFIALVVCGHTRAGCNYAIHSEDYIPQLRPYGGSFSTTTWSLKLLFDEYLKFRNKWSYPNTELNLARYRGATFTFYRDPKVDYIVVYNTVPPFKLNKYSCPMLHPGMMMQYKKKVLIPSYQTKPKGKAKIRLRIKPPVLFEDKWYTQQDLCPVNLLSLAVSACSFLHPFIPPESDNICITFQVLRDFYYTQMSVTPTTTTSLNQKDEKIFSDHLYKNPEYWQSHHTAARLSTSQKPALRNKEEIPNDHGYLNTTPTDSTFRTGNNTIYGQPSYRPNYTKLTKIREWYFTQENTDNPIHGSYLKPTLNSVDYHLGKYSAIFLSPYRTNTQFDTAYQDVTYNPNTDKGKGNKIWIQSCTKESTILDNACRCVIEDMPLWAMVNGYLEFCDSELPGANIYNTYIVVVICPYTKPQLLNKTNPKQGYVFYDTLFGDGKMPTGTGLVPFWLQSRWYPRAEFQQQVLHDLYLTGPFSYKDDLKSFSFNAKYKFSFLWGGNMIPQQIIKNPCKKEESTFTYPSREPRDLQVVDPLTMGPEWVFHTWDWRRGLFGKNAVDRVSKKPDDDAEYYPVPKRPRFFPPTDTQSEPEKDFGFTPESQELQQEDLRAPQEESQEVQQQRLLQLRLSQQFRLRQQLQHLFVQVLKTQAGLHINPLFLNHA

SEQ ID NO: 255 - protein, 750 aa, Torque teno virus
MAWTWWWQRRRRRWPWRRRRWRRLRTRRPRRLVRRRRKRYRVRRRRRWGRRRGRRTYLRRRLKKRKRRKKLRLTQWNPSTIRGCTIKGMAPLIICGHTMAGNNFAIRMEDYVSQIRPFGGSFSTTTWSLKVLWDEHTRFHNTWSYPNTQLDLARFKGVNFYFYRDKDTDFIVTYSSVPPFKMDKYSSAMLHPGTLMQRKKKILIPSFTTRPRGRKKVKLHIKPPVLFEDKWYTQQDLCDVNLLSLAVSAASFRHPFCPPQTDNICITFQVLKDFYYTQMSVTPDTAGQEKDIEIFEKHLFKNPQFYQTVHTQGIISKTRRTAKFSTSNNTLGSDTNITPYLEQPTATNHKNTLSTGNNSIYGLPSYNPIPDKLKKIQEWFWKQETDKENLVTGSYQTPTNKSVSYHLGKYSPIFLSSYRTNLQFITAYTDVTYNPLNDKGKGNQIWVQYVTKPDTIFNERQCKCHIVDIPLWAAFHGYIDFIQSELGIQEEILNIAIIVVICPYTKPKLVHDPPNQNQGFVFYDTQFGDGKMPEGSGLVPIYYQNRWYPRIKFQSQVVHDFILTGPFSYKDDLKSTVLTVEYKFKFLWGGNMIPEQVIRNPCKTEGHDLPHTSRLHRDLQVVDPHTVGPQWALHTWDWRRGLFGSEAIKRVSEQQVHDELYYPASKKPRFLPPISGLQEQERDYSSQEEKDQSSSEEEKDPKKKEQKQQQRLHLQFQEQQRLGNQLRLIFRELQKTQAGLHINPMLSNRL

SEQ ID NO: 256 - protein, 755 aa, Torque teno virus
MAWRWWWRRRWKPRRRPAWTKYRRRRWRRLRPRRPRRLARGRRRRRTVRRRRVRRLRRRRGWTRRRYLRRRKRRKLILTQWNPNIVRRCSIKGIIPLTMCGANTASFNYGMHSDDSTPQPEKFGGGMSTVTFSLYVLYDQFTRHMNRWSYSNDQLDLARYRGCSFKLYRNPTTDFIVQYDNNPPMKNTILSSPNTHPGMLMQQKHRILVPSWQTFPRGRKYVKVKIPPPKLFEDHWYTQPDLCKVPLVTLRSTAADFRHPFCSPQTNNPCTTFQVLRENYNEVLGLPYANTGSNNEVKIKIDNFENWLYNSSVHYQTFQTEQMFRPKQYNADGSTWKDYKSMLSTWTSQIYNKKTDSNYGYASYDFSKGKEFATQMRQHYWVQLTQLTATVPHIGPTYSNTTTPEYEYHAGWYSPVFIGPNRHNIQFRTAYMDVTYNPLNDKGQFNRVWFQYSTKPTTDFNNTQCKCVLENIPLWSALFGYSEYVESQLGPFQDHGTVGVVVVQCPYTVPPMYNKEKPDMGYVFYDTHFGNGKLGNGSGQVPRYWQMRWYPILKRQKQVMNDICKTGPFSYRDELLQVDLASPYTFRFNWGGDLLYHQVIKDPCSSSGLAPTDSSRFKRDVQVVSPLTMGPRLLFHSFDQRRGFFTPGAIKRMHDEQINVPDFTQKPKIPRIFPPVELRERAEAEEDSGSEKASFTSSQEREAEAQEKLPIQLQLRQQLRQQQQLRVHLQQVFLQLQKTKAHLHINPLFLAQGNM

SEQ ID NO: 257 - protein, 759 aa, Torque teno virus
MAYSYWWRRRRWPWRGRWRRWRRRRRIPRRRPRRPVRRYRRRPVRRKRRWGRRGRRRRYTRRYRRRLTVRRKRNKLRLSVWQPQNIRYCAIKGLFPILICGHGKSAGNYAIHSDDFITSRFSFGGGLSTTSYSLKLLFDQNLRGLNRWTASNDQLDLARYLGAIFWFYRDQKTDYIVQYDISEPFKIDKDSSPSFHPGILMKSKHKVLVPSFQTWPKGRSKVKLKIKPPKMFVDKWYTQEDLCTVTLVSLVVSLASFQHPFCRPLTDNPCVTFQVLQNFYNNVIGYSSSDTLVDNVFTSLLYSKASFWQSHLTPSYVKKINNNPDGSSISQRVGTMPDMTEYNKWVSNTNIGTGFVNSNVSVHYNYCQYNPNHTHLTTLRQYYFFWETHPAAANKTPVTHVPITTTKPTKDWWEYRLGLFSPIFLSPLRSSNIEWPFAYRDIIYNPLMDKGVGNMMWYQYNTKPDTQFSPTSCRAVLEDKPIWSMAYGYADFLLSILGEHDDVDFHGLVCIICPYTRPPLFDKDNPKMGYVFYDAKFGNGKWIDGTGFIPVEFQSRWKPELAFRKDVLTDLAMSGPFSYSDDLKNTTIQAKYKFKFKWGGNLSYHQTIRNPCTSDGQTPTTSRQSREVQIVDPLTMGPRYVFHSWDWRRGWLNDRTLKRLFQKPLDFEEYPKSPKRPRIFPPTEQLQEDPQEQERDSSSSEESLPTSSEETPPAHLLRVHLRKQLRQQRDLRVQLRALFAQVLKTQAGLHINPLLLAPQ

SEQ ID NO: 258 - protein, 739 aa, Torque teno virus
TAWWWGRRWRRRPWGRWRRRRRVWRRRPRTAVRRRRGRRYVSRRRRYRRRLRRRGRRRYRGRRKKRQTLVLKQWQPDVNRLCRITGWLPLIVCGTGRAQDNFIVHSEDITPRGAAYGGNLTHITWCLEAIYQEFLMHRNRWSRSNHDLDLCRYQGVVFKAYRHPKVDYILAYTRTPPFQATELSYMSCHPLLMLTAKHRIVVKSQETKKGGKKYVKFRIKPPRLMLNKWYFTHDFCKVPLFSMWASACDLRNPWLREGALSPTVGFFALKPDFYPNLSILPNEVSQQFDFFLNSAHPPSIQSEKDVRWEYTYTNLMRPIYNQTPSLKASTYDWQNYSNPNNYQACHQQFIAFKAQRFAKIKAEYQTVYPTLTTQTPQSEALTQEFGLYSPYYLTPTRISLDWHTVFHHIRYNPMADKGLGNMIWVDWCSRKEATYDPTRSKCMLKDLPLYMRFYGYCDWVTKSIGSETAWRDMRLMVVCPYTEPQLMKKNDKTWGYVIYGYNFANGNMPWLQPYIPISWFCRWFPCITHQREAMESVVATGPFMVRDQDRNSWDITIGYKFLWRWGGSPLPTQAIDDPCQQGTHPLPEPGTLPRILQVSDPTQLGPKTIFHLWDQRRGLFSKRSIERMSEYKGTDDLFSPGRPKRPKLDTRPEGLPEEQRGAYNLLQALEDSAQSEESDQEEMPPLEEEQVLHEQKKEALLQQLQQQKHHQRVLKRGLRLLLGDVLKLRRGLHIDPVLT

SEQ ID NO: 259 - protein, 680 aa, Torque teno virus; identical to SEQ ID NO: 6

SEQ ID NO: 260 - protein, 746 aa, Torque teno virus
TAWWRYRRRPWRRWRRRRWGLRTRRPRRTFRRRRARRYVSRGRRRRYRRRRRRGRRRRGRRRRHRKTLIVRQWQPDVIKRCFITGWLPLIICGNGHTQFNFITHMDDIPPKNASYGGNFTNLTFNLACFYDEFMHHRNRWSASNHDLELVRYIRTSLKLYRHESVDYIVCYTTTGPFETNEMSYMLTHPLAMLLSKRHVVVPSLKTKPHGRKYKKITIKPPKLMLNKWYFATDLCHIGLFQLWATGLELRNPWLRSGTNSPVIGFYVLKNQVYKNRYSNLNTTEAHNARQDAWNELTQTKTNDKWYNWQYTYNKLMKPIYYAASNESSNSAMKGKTYNWKHYKEYFSNTQTKWKTIIKDAYDLVREEYQQLYTTTMAYPPPWQSTTSNTGRQYLEHDCGIYSPYFLTPQIYSPEWHTAWSYIRYNPLTDKGIGNRVCVQYCSEASSDYNPIKSKCMLQDMPLWMMLYGYADYVVKSTGIQSAWTDMRVAIRCPYTDPKLVGSTENTMFIPIGLEFMNGDIPDKRPYIPLTWWFKWYPMITHQKTAIEAIVSCSPFMPRDQEQASWDITVGYKATFLWGGSPLPPQPIDDPCQKGKHDIPDPDTNPPRIQISDPQHLGPATLFHSWDLRRGYINTKSIKRISEHLDANEYFSTGVVSKKPRFDTPHHGQLSNQEEDALSILRQPQKEQEETTSEEEQALQKEEEQKEKLLQQLRVQRQHQRVLRQGIKHLMGDVLRLRQGVHWNPVL

SEQ ID NO: 261 - protein, 738 aa, Torque teno virus
TAWGWYRRRRWRPWRRRRWAIRRRRPRRTVRRRGRRRYVSRWPRRRYRRRRRRTRRRGGRKRRHRQTLILRQWQPDVMKKCFITGWMPLIICGTGNTQFNFITHEDDVPPKGASYGGNLTNLTFTLEGLYDEHLLHRNRWSRSNFDLDLSRYLYTIIKLYRHESVDYIVTYNRTGPFEISPLSYMNTHPMLMLLNKHHVVVPSPKTKPKGKRAIKIKIKPPKLMLNKWYFARDTCRIGLFQLYATGANLTNPWLRSGTNSPVVGFYVIKNSIYQDAFDNLADTEHTNQRKNVFENKLYPTTTTNKDNWQYTYTSLMKNIYFKTKQEAENQTMSSTYNFDTYKTNYDKVRTKWIKIAEDGYKLVSKEYKEIYISTATYPPQWNSRNYLSHDYGIYSPYFLTPQRYSPQWHTAWTYVRYNPLTDKGIGNRIFVQWCSEKNSSYNSTKSKCMLQDMPLFMLTYGYLDYVLKCAGSKSAWTDMRVCIRSPYTEPQLTGNTDDISFVIISEAFMNGDMPYLAPHIPVSLWFKWYPMILHQKAALETIVSCGPFMPRDQEANSWDITAGYKAVFKWGGSPLPPQPIDDPYQKPTHEIPDPDKHPPRLQIADPKILGPSTVFHTWDIRRGLFSTASLKRVSEYQPPDDLFSTGVASKRPRFDTPVQGQLESQEEESYRLLRALQKEQETSSSEEEQPQNQEIQEKLLLQLQQQRQQQRLLAKGIKHLLGDVLRLRKGVHWDPVLT

SEQ ID NO: 262 - protein, 738 aa, Torque teno virus
TAWYRRRRWRPWRRRRRPWTLRRRRARRFVRRRPRRRYVSRWRRRRYRRRLRRGRRRRGRRRRKETIIVRQWQPDVMRNCYITGFLPLIVCGSGNTQFNFITHENDIPPRGASYGGNLTNITFTLAALYDQYLLHRNRWSRSNFDLDLARYINTKLKLYRHDSVDYIVTYNRTGPFEVNPLTYMHTHPLLMLVNRHHIVVPSLKTKPRGKRYIKVKIKPPKLMLNKWYFAKDICPLGLFQLYATGLELRNPWIREGTNSPIVGFYVLKPSLYNGAMSNLADTEHLNQRQTLFNKLLPTQNQKDEWQYTYNKPMQKIYYEAANKQDSGFKNTTYNWTNYKTNYQKVQSQWQTVAQQNYNQVYNEFKEVYPLTATWPPQWNARQYMSHDFGIYSPYFLSPARFTDYWHSAYTYVRYNPMSDKGIGNIICIQWCSEKNSEFNETKNKCILRDMPLYMLTYGYLDYTTKCTGSNSIWTDARVAIRCPYTDPPLSNPTNKNTLYIPLSTSFMQGDMPWPTTNIPLKMWFKWYPMIMHQRACLETIVSCGPFMPRDQTASSWDITIAYRAFFKWGGNPLPPQPIDDPCQKDTHEIPDPDKHPRGIQISDPKVLGPPTVFHTWDIRRGLFSSTSLKRVSEYQPPDDPFSTGVVFKRPRLETQYKGTQETPEEDAYTLLKALQKEQESSSSEEELPQEEQEIQKTQLLKQLQLQQQQQRILKRGIRHLFGDVLRLRKGVHSNPDLL

SEQ ID NO: 263 - protein, 738 aa, Torque teno virus
TAWYRYRRRPWRRRRRPRWGLRRRRFRRSFRGRGRRRYVSRWSRRRYRRRRRRGRRRRGRRRRKRQTLIPRQWQPDVTKKCFITGWMPLIICGTGHTQFNFITHEEDIPGAGASYGGNLTNITITLGGLYEQYMLHRNHWSRSNYDLELARYLGFTLKCYRHATVDYILTYSRTTPFETNELSHMLTHPLLMLLNKHHRVIPSLKTRPKGKRSVRIHIKPPKLMINKWYFAKDLCNIGPCQIYATGLELSNPWLRSGTNSPVIGFWVLKNHLYDGNLSNIASGEQLTARQTLFTTKLLPSNNTKDEWQYAYTPLMKTFYTQAANTAAHNITDKTYNWKNYKTHYDKVQQTWTTKAQFNYDLVKEEYKTVYPTTATFPPEWSNRQYLEHDYGLFSPYFLTPNRYSTEWHMPITYVRYNPLADKGIGNRIYMQWCSESSSSFEPTKSKCMLQDMPLYMLTYGYLDYVVKCTGVKSAWTDMRVAIRSPYTFPQLIGSTDKVGFIPLGEKFMSGDTDPVKNFIPLKYWYRWYPFAANQKSVLETIVSCGPFMPRDQEAGSWDITVGYKATFKRGGSPLPPQPIDDPCQKPTHDLPDPDRHPPRIQISDPARLGPETLFHSWDIRRGYINTKAIKRISDYTESNDYFSTGVVSKRPRLETQYHGQHESQEEDAYLLLKQLQEEQETSSSEGEQAPQEKTLQKEKLLKQLQLHKQQQQLLRKGIRHLLGDVLRLRRGVHWDPGL

SEQ ID NO: 264 - protein, 736 aa, Torque teno virus
TAWWWGRWRQRRWGRRRRRPWRVRRRRPRRSFRRRRRGRYVSRRRRRRYYRRRLRRGRRRGRRKRHRPTLILRQWQPDVVKHCKITGWMPLIICGSGSTQMNFITHMDDTPPMGYTYGGNFVNVTFSLEAIYEQFLYHRNRWSRSNHDLDLARYQGTTLKLYRHATVDYILSYNRTGPFQISEMTYMSTHPAIMLLMKHRIVVPSLRTKPKGRRSIKIRIKPPKLMLNKWYFTKDICSMGLFQLMATGAELTNPWLRDTTKSPVIGFRVLKNSVYTNLSNLKDVSISGERKSILNKIHPETLTGSGNASKGWEYSYTKLMAPIYYSAVRNSTYNWQNYQTHCATTAIKFKEKQTSTLTLIKAEYLYHYPNNVTQVDFIDDPTLTHDFGIYSPYWITPTRISLDWDTPWTYVRYNPLSDKGIGNRIYAQWCSEKSSKLDTTKSKCILKDFPLWCMAYGYCDWVVKCTGVSSAWTDMRVAIICPYTEPALIGSDENVGFIPVSDTFCNGDMPFLAPYIPITWWIKWYPMITHQKEVLEAIVNCGPFVPRDQSSPAWEITMGYKMDWKWGGSPLPSQAIDDPCQKPTHELPDPDRHPRMLQVSDPTKLGPKTVFHKWDWRRGQLSKRSIKRVQEDSTDDEYVTGPLSRKRNKLDTKMPGPPTPEKESYTLLQALQESGQESSSQDEEQAPQKEENQKEALVEQLQLQKQHQRVLKRGLKLLLGDVLRLRRGVHWDPLLS

SEQ ID NO: 265 - protein, 743 aa, Torque teno virus
MAWGWWKRKRRWWWRKRWTRGRLRRRWPRRSRRRPRRRRVRRRRRWRRGRPRRRLYRRGRRYRRKRKRAKITIRQWQPAMTRRCFIRGHMPALICGWGAYASNYTSHLEDKIVKGPYGGGHATFRFSLQVLCEEHLKHHNYWTRSNQDLELALYYGATIKFYRSPDTDFIVTYQRKSPLGGNILTAPSLHPAEAMLSKNKILIPSLQTKPKGKKTVKVNIPPPTLFVHKWYFQKDICDLTLFNLNVVAADLRFPFCSPQTDNVCITFQVLAAEYNNFLSTTLGTTNESTFIENFLKVAFPDDKPRHSNILNTFRTEGCMSHPQLQKFKPPNTGPGENKYFFTPDGLWGDPIYIYNNGVQQQTAQQIREKIKKNMENYYAKIVEENTIITKGSKAHCHLTGIFSPPFLNIGRVAREFPGLYTDVVYNPWTDKGKGNKIWLDSLTKSDNIYDPRQSILLMADMPLYIMLNGYIDWAKKERNNWGLATQYRLLLTCPYTFPRLYVETNPNYGYVPYSESFGAGQMPDKNPYVPITWRGKWYPHILHQEAVINDIVISGPFTPKDTKPVMQLNMKYSFRFTWGGNPISTQIVKDPCTQPTFEIPGGGNIPRRIQVINPKVLGPSYSFRSFDLRRDMFSGSSLKRVSEQQETSEFLFSGGKRPRIDLPKYVPPEEDFNIQERQQREQRPWTSESESEAEAQEETQAGSVREQLQQQLQEQFQLRRGLKCLFEQLVRTQQGVHVDPCLV

SEQ ID NO: 266 - protein, 726 aa, Torque teno virus
MAWGWWKRRRRWWFRKRWTRGRLRRRWPRSARRRPRRRRVRRRRRWRRGRPRRRLYRRYRRKKRRRRKPKTVLKQWQPDITKRCYIIGYIPAIICGAGTWSHNYTSHLLDIIPKGPFGGGHSTMRFSLKVLFEEHLRHLNFWTRSNQDLELVRYFRCSFRFYRDQHTDYLVHYSRKTPLGGNRLTAPSLHPGVQMLSKNKIIVPSYDTKPKGKSYVKVTIAPPTLLTDKWYFSKDICDTTLVNLDVVLCNLRFPFCSPQTDNPCITFSVLHSIYNDFLSIVDTGNYKTQFVSNLSTKVGTDWGKRLNTFRTEGCYSHPKLPKKAVTPGNDKTYFTVPDGLWGDAVFNAEASNIITKNMESYSESAKARGVQGDPAFCHLTGIYSPPWLTPGRISPETPGLYTDVTYNPYADKGVGNRIWVDYCSKKGNKYDNTSKCLLEDMPLWMVTFGYVDWVKKETGNWGIPLWARVLIRCPYTVPKLYNEADPNYGWVPYSYYFGEGKMPNGDLYVPFKIRMKWYPSMWNQEPVLNDLAKSGPFAYKDTKTSVTVTAKYKFTFNFGGNPVPSQIVQDPCTQSTYDIPGTGNLPRRIQVIDPKVLGPHYSFHRWDFRRGLFGQQAIKRVSEQPTTSEFLFSGPKRPRIDQGPYIPPEKGSDSLQRESRPWSNSETEAETEAPSEEEPENQEEQVLQLQLRQQLREQRKLRQGIQCLFEQLITTQQGVHKNPLLE

SEQ ID NO: 267 - protein, 747 aa, Torque teno virus
MAWSWWWRRRKRWWPRRRRRWRRFRTRRARRAVPRRRRRRRVRRRRWGRRRRRRRVFYKRRRRKTGRLYRKPKKKLVLTQWHPTTVRNCSIRGLVPLVLCGHTQGGRNFALRSDDYPKQGSPYGGSFSTTTWNLRVLFDEHQKHHNTWSYPNNQLDLGRYKGCTFYFYRDKKTDYIVKFQRRGPFKINKYSSPMAHPGMMMLDKMKILVPSFDTRPGGRRRVKVTIRPPTLLEDKWYTQQDLAPVNLVSLVVSAASFIHPFSQPQTNNICTTFQVLKDMYYDCIGINSTLTTKYENLFNKLYSKCCYFETFQTIAQLNPGFKAAKKTTNGSGSTAATLGDAVTELKNPNGTFYTGNNSTFGCCTYKPTKEIGSNANKWFWHQLTATDSDTLGQYGRASIKYMEYHTGIYSSIFLSPLRSNLEFPTAYQDVTYNPLTDRGIGNRIWYQYSTKENTTFNETQCKCVLSDLPLWSMFYGYVDFIESELGISAEIHNFGIVCVQCPYTFPPMFDKSKPDKGYVFYDTLFGNGKMPDGSGHVPTYWQQRWWPRFSFQRQVMHDIILTGPFSYKDDSVMTGITAGYKFKFSWGGDMVSEQVIKNPERGDGRDSTYPDRQRRDLQVVDPRSMGPQWVFHTFDYRRGLFGKDAIKRVSEKPTDPDYFTTPYKKPRFFPPTAGEEKLQEEDSALQEKRSPLSSEEGQTRAQVLQQQVLQSELQQQQELGEQLRFLLREMFKTQAGIHMNPRAFQEL

SEQ ID NO: 268 - protein, 747 aa, Torque teno virus; identical to SEQ ID NO: 267

SEQ ID NO: 269 - protein, 745 aa, Torque teno virus
MAWGWWRWRRRWPARRWRRRRRRRPVRRTRARRPARRYRRRRTVRTRRRRWGRRRYRRGWRRRTYVRKGRHRKKKKRLILRQWQPATRRRCTITGYLPIVFCGHTKGNKNYALHSDDYTPQGQPFGGALSTTSFSLKVLFDQHQRGLNKWSFPNDQLDLARYRGCKFYFYRTKQTDWIGQYDISEPYKLDKYSCPNYHPGNMIKAKHKFLIPSYDTNPRGRQKIIVKIPPPDLFVDKWYTQEDLCSVNLVSLAVSAASFLHPFGSPQTDNPCYTFQVLKEFYYQAIGFSATDQQREKVFDILYKNNSYWESNITPFYVINVKKGSNTTQYMSPQISDSSFRKKVNTNYNWYTYDAKTNASQLKQLRNAYFKQLTSEGPQHTYSDNGYASQWTTPSTDAYEYHLGMFSTIFLAPDRPVPRFPCAYQDVTYNPLMDKGVGNHVWFQYNTKADTQLIVTGGSCKAHIQDIPLWAAFYGYSDFIESELGPFVDADTVGLICVICPYTKPPMYNKTNPMMGYVFYDRNFGDGKWTDGRGKIEPYWQVRWRPEMLFQETVMADIVQTGPFSYKDELKNSTLVCKYKFYFTWGGNMMFQQTIKNPCKTDGQPTDSSRHPRGIQVADPEQMGPRWVFHSFDWRRGYLSEKALKRLQEKPLDYDEYFTQPKRPRIFPPTESAEGEFREPEKGSYSEEERSQASAEEQTEEATVLLLKRRLREQQQLQQQLQFLTREMFKTQAGLHINPMLLNQR

SEQ ID NO: 270 - protein, 745 aa, Torque teno virus
MAWGWWRWRRRWPARRWRRRRRRRPVRRTRARRPARRYRRRRTVRTRRRRWGRRRYRRGWRRRTYVRKGRHRKKKKRLILRQWQPATRRRCTITGYLPIVFCGHTKGNKNYALHSDDYTPQGQPFGGALSTTSFSLKVLFDQHQRGLNKWSFPNDQLDLARYRGCKFYFYRTKQTDWIGQYDISEPYKLDKYSCPNYHPGNMIKAKHKFLIPSYDTNPRGRQKIIVKIPPPDLFVDKWYTQEDLCSVNLVSLAVSAASFLHPFGSPQTDNPCYTFQVLKEFYYQAIGFSATDEQREKVFDILYKNNSYWESNITPFYVINVKKGCNTTQYMSPQISDSSFRKKVNTNYNWYTYDAKTNASQLKQLRNAYFKQLTSEGPQHTYSDNGYASQWTTPSTDAYEYHLGMFSTIFLAPDRPVPRFPCAYQDVTYNPLMDKGVGNHVWFQYNTKADTQLIVTGGSCKAHIQDIPLWAAFYGYSDFIESELGPFVDADTVGLICVICPYTKPPMYNKTNPMMGYVFYDRNFGDGKWTDGRGKIEPYWQVRWRPEMLFQETVMADIVQTGPFSYKDELKNSTLVCKYKFYFTWGGNMMFQQTIKNPCKTDGQPTDSSRHPRGIQVADPEQMGPRWVFHSFDWRRGYLSEKALKRLQEKPLDYDQYFTQPKRPRIFPPTESAEGEFREPEKGSYSEEERLQASAEEQTEEATVLLLKRRLREQQQLQQQLQFLTREMFKTQAGLHINPMLLNQR

SEQ ID NO: 271 - protein, 745 aa, Torque teno virus
MAWGWWRWRRRWPARRWRRRRRRRPVRRTRARRPARRYRRRRTVRTRRRRWGRRRYRRGWRRRTYVRKGRHRKKKKRLILRQWQPATRRRCTITGYLPIVFCGHTKGNKNYALHSDDYTPQGQPFGGALSTTSFSLKVLFDQHQRGLNKWSFPNDQLDLARYRGCKFYFYRTKQTDWIGQYDISEPYKLDKYSCPNYHPGNMIKAKHKFLIPSYDTNPRGRQKIIVKIPPPDLFVDKWYTQEDLCSVNLVSLAVSAASFLHPFGSPQTDNPCYTFQVLKEFYYQAIGFSATDEQREKVFDILYKNNSYWESNITPFYVINVKKGCNTTQCMSPQISDSSFRKKVNTNYNWYTYDAKTNASQLKQLRNAYFKQLTSEGPQHTYSDNGYASQWTTPSTDAYEYHLGMFSTIFLAPDRPVPRFPCAYQDVTYNPLMDKGVGNHVWFQYNTKADTQLIVTGGSCKAHIQDIPLWAAFYGYSDFIESELGPFVDADTVGLICVICPYTKPPMYNKTNPMMGYVFYDRNFGDGKWTDGRGKIEPYWQVRWRPEMLFQETVMADIVQTGPFSYKDELKNSTLVCKYKFYFTWGGNMMFQQTIKNPCKTDGQPTDSSRHPRGIQVADPEQMGPRWVFHSFDWRRGYLSEKALKRLQEKPLDYDQYFTQPKRPRIFPPTESAEGEFREPEKGSYSEEERSQASAEERTEEATVLLLKRRLREQQQLQQQLQFLTREMFKTQAGLHINPMLLNQR

SEQ ID NO: 272 - protein, 726 aa, Torque teno virus
MAWRWWKRRRRWWFRKRWTRGRLRRRWPRPARRRPRRRRVRRRRRWRRGRPRRRLYRRYRRKKRRRRKPKIILKQWQPDIVKRCYIVGYIPAIICGAGTWSHNYTSHLLDIIPKGPFGGGHSTMRFSLKVLSEEHLRHLNFWTKSNQDLELIRYFRCSFKFYRDQDTDYIVHYSRKTPLGGNRLTAPNLHPGVQMLSKNKIIVPSYATKPKGPSYIKVTIAPPTLLTDKWYFSKDVCDTTLVNLDVVLCNLRFPFCSPQTDNPCITFQVLHSIYNDFLSIVDTNNYKESFVSALPTKVSTDWGKRLNTFRTEGCYSHPKLHKKAVTAATDTEYFTKPDGLWGDTIFDVENGQKIIKNMESYAKSAKERGINGDPAFCHLTGIYSPPWLTPGRISPETPGLYTDVTYNPYADKGVGNRIWVDYCSKKGNKYDNTSKCLLEDMPLWMVCFGYVDCVKKETGNWGIPLWARVLIRSPYTVPKLYNEADPNYGWVPIFYYFGEGKMPNGDMYIPFKIRMKWYPSMWNQEPVLNDLAKSGPFAYKNTKTSVTVTAKYKFTFNFGGNPVPSQIVQDPCTQPTYDIPGTGNLPRRIQVIDPKVLSPHYSFHRWDFRRGLFGSQAIKRVSEQSTTSEFLFSGPKKPRIDQGPYIPPEKGSGSLQREPRPWSSSETEAETEAPSEEEPENQEEQVLQLQLRQQLREQRKLRQGIQCLFEQLITTQQGVHKNPLLE

SEQ ID NO: 273 - protein, 726 aa, Torque teno virus
MAWRWWKRRRRWWFRKRWTRGRLRRRWPRPARRRPRRRRVRRRRRWRRGRPRRRLYRRYRRKKHRRRKPKIILKQWQPDIVKRCYIVGYIPAIICGAGTWSHNYTSHLLDIIPKGPFGGGHSTMRFSLKVLFEEHLRHLNFWTKSNQDLELIRYFRCSFKFYRDQDTDYIVHYSRKTPLGGNRLTAPNLHPGVQMLSKNKIMVPSYATKPKGPSYIKVTIAPPTLLTDKWYFSKDVCDTTLVNLDVVLCNLRFPFCSPQTDNPCITFQVLHSIYNDFLSIVDTNNYKESFVSALPTKVSTDWGKRLNTFRTEGCYSHPKLHKKAVTAATDTEYFTKPDGLWGDTIFDVENGQKIIKNMESYAKSAKERGINGDPAFCHLTGIYSPPWLTPGRISPETPGLYTDVTYNPYADKGVGNRIWVDYCSKKGNKYDNTSKCLLEDMPLWMVCFGYVDWVKKETGNWGIPLWARVLIRSPYTVPKLYNEADPNYGWVPISYYFGEGKMPNGDMYIPFKIRMKWYPSMWNQEPVLNDLAKSGPFAYKNTKTSVTVTAKYKFTFNFGGNPVPSQIVQDPCTQPTYDIPGTGNLPRRIQVIDPKVLGPHYSFHRWDFRRGLFGSQAIKRVSEQSTTSEFLFSGPKKPRIDQGPYIPPEKGSGSLQREPRPWSSSETEAETEAPSEEEPENQEEQVLQLQLRQQLREQRKLRQGIQCLFEQLITTQQGVHKNPLLE

SEQ ID NO: 274 - protein, 726 aa, Torque teno virus
MARRWWKRRRRWWFRKRWTRGRLRRRWPRPARRRPKRRRVRRRRRWRRGRPRRRLYRRYRRKKRRRRKPKIILKQWQPDIVKRCYIVDYIPAIICGAGTWSRNYTSHLLDIIPKGPFGGGHSTMRFSLKVLFEEHLRHLNFWTKSNQDLELIRYFRCSFKFYRDQDTDHIVHYSRKTPLGGNRLTAPNLHPGVQMLSKNKIIVPSYATKPKGPSYIKVTIAPPTLLTDKWYFSKDVCDTTLVNLDVVLCNLRFPFCSPQTDNPCITFQVLHSIYNDFLSIVDTNNYKESFVAALPTKVSTDWGKRLNTFRTEGCYSHPKLHKKAVTAATDTEYFTKPDGLWGDTIFDVENGQKIIKNMESYAKSAKERGINGDPAFCHLTGIYSPPWLTPGRISPETPGLYTDVTYNPYADKGVGNRIWVDYCSKKGNKYGNTSKCLLEDMPLWMVCFGYVDWVKKETGNWGIPLWARVLIRSPYTVPKLYNEADPNYGWVPISYYFGEGKMPNGDMYVPFKIRMKWYPSMWNQEPVLNDLAKSGPFAYKNTKTSVTVTAKYKFTFNFGGNPVPSQIVQDPCTQPTYDIPGTGNLPRRIQVIDPKVLGPHYSFHRWDFRRGLFGSQAIKRVSEQSTTSEFLFSGPKKPRIDQGPYIPPEKGSGSLQREPRPWSSSETEAETEAPSEEEPENQEEQVLQLQLRQQLREQRKLRQGIQCLFEQLITTQQGVHKNPLLE

SEQ ID NO: 275 - protein, 726 aa, Torque teno virus
MAWRWWKRRRRWWFRKRWTRGRLRRRWPRPARRRPKRRRVRRRRRWRRERPRRRLYRRYRRKKRRRRKPKIILKQWQPDIVKRCYIVGYIPAIICGAGTWSHNYTSHLLDIIPKGPFGGGHSTMRFSLKVLFEEHLRHLNFWTKSNQDLELIRYFRCSFKFYRDQDTDYIVHYSRKTPLGGNRLTAPNLHPGVQMLSKNKIIVPSYATKPKGPSYIKVTIAPPTLLTDKWYFSKDVCDTTLVNLDVVLCKLRFPFCSPQTDNPCITFQVLHSIYNDFLSIVDTNNYKESFVAALPTKVSTDWGKRLNTFRTEGCYSHPKLHKKAVTAATDTEYFTKPDGLWGDTIFDVENGQKIIKNMESYAKSAKERGINGDPAFCHLTGIYSPPWLTPGRISPETPGLYTDVTYNPYADKGVGDRIWVDYCSKKGNKYDNTSKCLLEDMPLWMVCFGYVDWVKKETGNWGIPLWARVLIRSPYTVPKLYNEADPNYGWVPISYYFGEGKMPNGDMYVPFKIRMKWYPSMWNQEPVLNDLAKSGPFAYKNTKTSVTVTAKYKFTFNFGGNPVPSQIVQNPCTQPTYDIPGTGNLPRRTQVIDPKVLGPHYSFHRWDFRRGLFGSQAIKRVSEQSTTSEFLFSGPKKPRIDQGPYIPPEKGSGSLQREPRPWSSSETEAETEAPSEEEPENQEEQVLQLQLRQQLREQRKLRQGIQCLFEQLITTQQGVHKNPLLE

SEQ ID NO: 276 - protein, 743 aa, Torque teno virus
MAWGWWKRRRRRWWRGLWRRRRFARRRPRRPARRPRRRRVRRRRRWRRGRLRRRVYNRRRRIRRKRRRQKLTIRQWQPDKRRICRIKGYLPAIIYGDGTFSKNYTSHLEDRISKGPFGGGHGTARMSLKVLYDDHLKGLNIWTYSNKDLELVRYMHTTITFYRHPDTDFIAVYNRKTPLGGNRYTAPSLHPGNMMLQRTKILIPSFKTKPRGSGKIRVVIKPPTLLVDKWYFQKDICDVTLFNLNITAASLRFPFCSPQTNNPCVTFQVLHSVYDKALGINTFGTKETPEDQQMEDIKNWLTKALNTAGFTVLNTFRTEGIYSHPQLKKPPEGSNKPSAEQYFAPLDSLWGDKIYVNNNTSPSQTEATIPGILARNACTYYQKAKTSTLRQHLGAMAHCHLTGIFNPALLTQGRLSPEFFGLYKEIIYNPYDDKGKGNRIWIDPLTKPDNIFDARSKVELEDMPLWMACFGYNDWCKKELNNWGLEVEYRVLLRCPYTYPKLYNDANPNYGYVPISYNFSAGKTVEGDLYVPIMWRTKWHPTMYNQSPVLEDLAMAGPFAPKEKIPSSTLTIKYKAKFIFGGNPISEQIVKDPCTQPTYEIPGGGTLPRRIQVINPEYIGPHYSFKSFDIRRGYFSAKSVKRVSEQSDITEFIFSGPKKPRIDQDRYQEAEEHSDSRLREEKPWESSQETESEAQEEEIQETNIQLQLQHQLKEQLQLRRGIQCLFEQLTKTQQGVHINPSLV

SEQ ID NO: 277 - protein, 603 aa, Torque teno virus
MSLKVLYDDHLKGLNIWTYSNKDLELVRYMHTTITFYRHPDTDFIAVYNRKTPLGGNRYTAPSLHPGNMMLQRTKILIPSFKTKPRGSGKIRVVIKPPTLLVDKWYFQKDICDVTLFNLNITAASLRFPFCSPQTNNPCVTFQVLHSVYDKALGINTFGTKETPEDQQMEDIKNWLTKALNTAGFTVLNTFRTEGIYSHPQLKKPPEGSNKPSAEQYFAPLDSLWGDKIYVNNNTSPSQTEATIPGILARNACTYYQKAKTSTLRQHLGAMAHCHLTGIFNPALLTQGRLSPEFFGLYKEIIYNPYDDKGKGNRIWIDPLTKPDNIFDARSKVELEDMPLWMACFGYNDWCKKELNNWGLEVEYRVLLRCPYTYPKLYNDANPNYGYVPISYNFSAGKTVEGDLYVPIMWRTKWYPTMYDQSPVLEDLAMAGPFAPKEKIPSSTLTIKYKAKFIFGAILYLNRLSRTPAPSPPTKFPEAVRSLAEYKSLTRNTSGHTTHSKASTSDVGTLARRVLKECQNNQTLLSLYSQVQKSQGSTKTGTKKQKNTQILDSEKRNRGRARKKQRAKPKKKRYKRQTSSSSCSTSSKSNCSSDGESSASSSN

SEQ ID NO: 278 - protein, 732 aa, Torque teno virus
MAWRWWWRRRRPWRWRWRRRRRPARRRRRRRPARRARRPRVRRWRRRRVWAPRPYIRRRRRSFRRKKIKITQWNPAVTKKCTVTGYLPVIYCGTGDIGTTFQNFGSHMNEYKQYNAAGGGFSTMLFTMQNLYEEYQKHRCRWSKSNQDLDLCRYLDCKLTFYRSPNTDFIVGYNRKPPFIDTQITRCTLHPGMLIQERKKVIIPSFQTRPKGRIKRKIKVRPPTLFTDKWYFQRDLCKVPLVTVSASAASLRFPFGSPQTENYCIYFQVLDPWYHTRLSITGGKPAEYWTQLKAYLTQGWGRSTNNAGYQHGPLGTYFNTLKTSEHIRQPPADNYKQANKDTTYYGRVDSHWGDHVYQQTIIQAMEENQSNMYTKRALHTFLGSQYLNFKSGLFSSIFLDNARLSPDFKGMYQEVVYNPFNDRGVGNKVWVQWCTNEDTIFKDLPGRVPVVDLPLWCALMGYSDYCKKYFHDDGFLKEARITIISPYTNPPLINNKNTNEGFVPYSFYFGKGRMPDGNGYIPIDFRFNWYPCIFHQTNWINDMVQCGPFAYHGDEKNCSLTMKYKFKFLFGGNPISQQTIKDPCQQPDWQLPGSGRFPRDVQVSNPRLQTEGSTFHAWDFRRGFYGKRAIERLQGQQDDVTYIAGPPKRPRFEVPALAAEGSSNTRRSELPWQTSEEESSQEENSEETEEETSLSQQLKQQCIEQKLLKRTLHQLVKQLVKTQYHLHAPIIH

SEQ ID NO: 279 - protein, 726 aa, Torque teno virus
MAWRWWKRRRRWWFRKRWTRGRLRRRWPRPARRRPRRRRVRRRRRWRRGRPRRRLYRRYRRKKRRRRKPKIILKQWQPDIVKRCYIIGYIPAIICGAGTWSHNYTSHLLDIIPKGPFGGGHSTMRFSLKVLFEEHLRHLNFWTKSNQDLELIRYFRCSFKFYRDQDTDYIVHYSRKTPLGGNRLTAPSLHPGVQMLSKNKILVPSYATKPKGGSYVKVTIAPPTLLTDKWYFSKDVCDTTLVNLDVVLCNLRFPFCSPQTDNPCITFQVLHSYYNDYLSIVDTALYKTSFVNNLSTKLGTTWANRLNTFRTEGCYSHPKLLKKTVTAANDTKYFTTPDGLWGDAVFDVSDAKKLTKNMESYAASANERGVQGDPAFCHLTGIFSPPWLTPGRISPETPGLYTDVTYNPYADKGVGNRIWVDYCSKKGNKYDNTSKCVLEDMPLWMLCFGYVDWVKKETGNWGIPLWARVLIRSPYTVPKLYHENDPDYGWVPISYYFGEGKMPNGDMYVPFKVRMKWYPSMWNQEPVLNDLAKSGPFAYKNTKTSVTVTAKYKFTFNFGGNPVPSQIVQDPCTQPTYDIPGTGNLPRRIQVIDPKVLGPHYSFHRWDFRRGLFGTQAIKRVSEQSTTSEFLFSGPKKPRIDQGPYIPPEKGSGSLQRESRPWSSSETEAETEAPSEEEPENQEEQVLQLQLRQQLREQRKLRQGIQCLFEQLITTQQGVHKNPLLE

SEQ ID NO: 280 - protein, 760 aa, Torque teno virus
MAWWGRWRRWRWRPRRWRRRRRRRVPRRRAQRSVRRRRARRVRRRRWGRRRWRRGYRRRLRLRRKRKRKRRLVLTQWHPAKVRRCRISGVLPMILCGAGRSSFNYGLHSDDFTKQKPNNQNPHGGGMSTVTFNLKVLFDQYERFMNKWSYPNDQLDLARYKGCKFTFYRHPEVDFLAQYDNVPPMKMDELTAPNTHPALLLQSRHRVKIYSWKTRPFGSKKVTVKIGPPKLFEDKWYSQSDLCKVSLVSWRLTACDFRFPFCSPQTDNPCVTFQVLGEQYYEVFGTSVLDVPASYNSQITTFEQWLYKKCTHYQTFATDTRLAPQKKATTSTNHTYNPSGNTESSTWTQSNYSKFKPGNTDSNYGYCSYKVDGETFKAIKNYRKQRFKWLTEYTGENHINSTFAKGKYDEYEYHLGWYSNIFIGNLRHNLAFRSAYIDVTYNPTVDKGKGNIVWFQYLTKPTTQLIRTQAKCVIEDLPLYCAFFGYEDYIQRTLGPYQDIETVGVICFISPYTEPPCIRKEEQKKDWGFVFYDTNFGNGKTPEGIGQVHPYWMQRWRVMAQFQKETQNRIARSGPFSYRDDIPSATLTANYKFYFNWGGDSIFPQIIKNPCPDTGLRPSGHREPRSVQVVSPLTMGPEFIFHRWDWRRGFYNPKALKRMLEKSDNDAESSTGPKVPRWFPAHHDQEQESDFDSQETRSQSSQEEAAQEALQDVQETSVQQYLLKQFREQRLLGQQLRLLMLQLTKTQSNLHINPRVLDHA

SEQ ID NO: 281 - protein, 739 aa, Torque teno virus
MFWWGWRRRWWWKPRRRWRRRRARRPRRVPRRRYRRAARRYRGRRVRRRRAGGWRGRRRYSRHYSRRLTVRRKKKKLTLKIWQPQNIRKCRIRGLLPLLICGHTRSAFNYAIHSDDKTPQQESFGGGLSTVSFSLKVLFDQNQRGLNRWSASNDQLDLARYLGCTFWFYRDKKTDFIVQYDISAPFKLDKNSSPSYHPFMLMKAKHKVLIPSFDTKPKGREKIKVRIQPPKMFIDKWYTQEDLCPVILVSLAVSVASFTHPFCSPQTANPCITFQVLKEFYYPAMGYGAPETTVTSVFNTLYTTATYWQSHLTPQFVRMPTKNPDNTENNQAQAFNTWVDKDFKTGKLVKYNFPQYAPSIEKLKQLRTYYFEWETKHTGVAAPPTWTTPTSDRYEYHMGMFSPTFLTPFRSAGLDFPGAYQDVTYNPLTDKGVGNRMWFQYNTKIDTQFDARSCKCVLEDMPLYAMAYGYADFLEQEIGEYQDLEANGYVCVISPYTKPPMFNKHNPQQGYVFYDSQWGNGKWIDGTGFVPVYWLTRWRVELLFQKKVLSDIAMSGPFSYPDELKNTVLTAKYRFDFKWGGNLFHQQTIRNPCKPEETSTGRVPRDVQVVDPVTMGPRFVFHSWDWRRGFLSDRALKRMFEKPLDLEGFAASPKRPRIFPPTEGQLAREQKEQEESSDSQEESSLTSLEEVPEETKLRLHLRKQLREQRSIRQQLRTMFQQLVKTQAGLHLNPLLSSQL

SEQ ID NO: 282 - protein, 767 aa, Torque teno virus
MAWRWWWQRRWRRRPWPRRRWRRLRRRRPRRPVRRRRRRATVRRRRWRGRRGRRTYTRRAVRRRRRPRKRFVLTQWSPQTARNCSIRGIVPMVICGHTRAGRNYALHSEDFTTQIRPFGGSFSTTTWSLKVLWDEHQKFQNRWSYPNTQLDLARYRGVTFWFYRDQKTDYIVQWSRNPPFKLNKYSSPMYHPGMMMQAKKKLVVPSFQTRPKGKKRYRVRIRPPNMFNDKWYTQEDLCPVPLVQIVVSAATQTKKNCSPQTNNPCITFQVLKDKYLNYIGVNSSETRRNSYKTLQEKLYSQCTYFQTTQVLAQLSPAFQPAKKPNRTNNSTSTTLGNKVTDLKSNNGKFHTGNNPVFGMCSYKPSKDILYKANEWLWDNLMVENDLHSTYGKATLKCMEYHTGIYSSIFLSPQRSLEFPAAYQDVTYNPNCDRAIGNRVWFQYGTKMNTNFNEQQCKCVLTNIPLWAAFNGYPDFIEQELGISTEVHNFGIVCFQCPYTFPPLYDKKNPDKGYVFYDTTFGNGKMPDGSGHIPIYWQQRWWIRLAFQVQVMHDFVLTGPFSYKDDLANTTLTARYKFRFKWGGNIIPEQIIKNPCKREQSLGSYPDRQRRDLQVVDPSTMGPIYTFHTWDWRRGLFGADAIQRVSQKPEDALRFTNPFKRPRYLPPTDGEDYRQEEDFALQERRRRTSTEEVQDEESPPQNAPLLQQQQQQRELSVQHAEQQRLGVQLRYILQEVLKTQAGLHLNPLLLGPPQTRCISLSPPEAYSP

SEQ ID NO: 283 - protein, 770 aa, Torque teno virus
MAAWWWGRRRRWRRWRRRRLPRRRRWRRRRRWPRRRRRRWPRRRRRRRPARRPRRRRRRRRVRRPRRRQKLVLTQWNPQTVRKCIIRGFVPLFQCSRTAYHRNFVDHMDDVYTTGPFGGGTGSMLFTLSFFYHEFKKHHCKWSASNRDFDLCRYRGTVLKFYRHPDVDYIVWLNRNPPFQENLLDAMSRQPLIMLQTHKCILVRSFKTHPRGPSYVRMKVRPPRLLTDKWYFQSDFCNVPLFQLQFALAELRFPIGSPQTNTTCVNFLVLDNRYHLFLDNKPQQSDNSQREERGHGYPFNGSEGEADRLKFWHSLWNTGRFLNTTHINTLQPNISKLQEHKAEDTEAKTTYKSLINGNKKVYNDSQYMQNVWAQNKINTLYEAIAEEQYRKIQKYYNTTYGQYQRQLFTGKKYWDYRVGMFSPTFLSPSRLNPEMPGAYTEIAYNPWTDEGTGNVVCLQYLTKETSDYKPHAGSKFTIEDVPLWIAMNGYVDICKKEGKDPGIRLNCLMCIRCPYTRPKLYNPRYPKELFVVYSYNFAHGRMPGGDKYIPMEFKDRWYPSLMHQEEVIEDIVRSGPFALKDQTEMVTCMMRYSALFNWGGNIIREQAVEDPCKKNTFALPGASGVARLLQVSNPIRQTPSTTWHSWDWRRSLFTQTGIKRMREQQPYDEITYAGPKRPKLTVPAGPTLAAGDAYNYWERKPLTSPGETLPTQTETETEAPEEEAQQEEVQEGLQLQQLWEQQLQQKRQLGVMFQQLLRLRTGAEIHPALA

SEQ ID NO: 284 - protein, 770 aa, Torque teno virus
MAAWWWGRRRRWRRWRRRRLPRRRRWRRRRRWPRRRRRRWPRRRRRRRPARRPRRRRRRRRVRRPRRRQKLVLTQWNPQTVRKCIIRGFVPLFQCSRTACHRNFVDHMDDVYTTGPFGGGTGSMLFTLSFFYHEFKKHHCKWSASNRDFDLCRYRGTVLKFYRHPDVDYIVWLNRNPPFQENLLDAMSRQPLIMLQTHKCILVRSFKTHPRGPSYVRMKVRPPRLLTDKWYFQSDFCNVPLFQLQFALAELRFPIGSPQTNTTCVNFLVLDNRYHLFLDNKPQQSENLQRKERGHGYSFTGNEGEVDRLKFWHSLWNTGRFLNTTHINTLLPNISKLQEHKAEDRQANAKYKNLINGNKKVYNDSQYMQNVWEENKINTLYDAIAEEQYRKIQKYYNTTYGQYQRQLFTGKKYWDYRVGMFSPTFLSPSRLNPEMPGAYTEIAYNPWTDEGTGNVVCLQYLTKETSDYKPHAGSKFTIEDVPLWIAMNGYVDICKKEGKDPGIRLNCLMCIRCPYTRPKLYNPRYPEELFVVYSYNFAHGRMPGGDKYIPMEFKDRWYPSLMHQEEVIEDIVRSGPFALKDQTEMVTCMMRYSALFNWGGNIIREQAVEDPCKKNTFALPGASGVARLLQVSNPIRQTPSTTWHSWDWRRSLFTQTGIKRMREQQPYDEITYAGPKRPKLTVPAGPTLAAGDAYNYWERKPLTSPGETLPTQTDTETEAPEEEAQQEEVQEGLQLQQLWEQQLQQKRQLGVMFQQLLRLRTGAEIHPALA

SEQ ID NO: 285 - protein, 770 aa, Torque teno virus
MAAWWWGRRRRWRRWRRRRLPRRRRWRRRRRWPRRRRRRWPRRRRRRRPARRPRRRRRRRRVRRPRRRQKLVLTQWNPQTVRKCIIRGFVPLFQCSRTAYHRNFVDHMDDVYTTGPFGGGTGSMLFTLSFFYHEFKKHHCKWSASNRDFDLCRYRGTVLKFYRHPDVDYIVWLNRNPPFQEDLLDAMSRQPLIMLQTHKCILVRSFKTHPRGPSYVRMKVRPPRLLTDKWYFQSDFCNVPLFQLQFALAELRFPIGSPQTNTTCVNFLVLDNRYHLFLDNKPQQSDNPQRKERGHGYSFTGNEGEMDRERFWHSLWSTGRFLNTTHINTLLPNISKLQDHKAEDKDAKTTYKSLINDNKKVYNDSQYMQNVWDQNKIHTLYMAIAEEQYRKIQKYYNTTYGQYQRQLFTGKKYWDYRVGMFSPTFLSPSRLNPEMPGAYTEIAYNPWTDEGTGNVVCLQYLTKETSDYKPHAGSKFTIEDVPLWIAMNGYVDICKKEGKDPGIRLNCLMCIRCPYTRPKLYNPRYPEELFVVYSYNFAHGRMPGGDKYIPMEFKDRWYPSLMHQEEVIEDIVRSSPFALKDQTEMVTCMMRYSALFNWGGNIIREQAVEDPCKKNTFALPGASGVARLLQVSNPIRQTPSTTWHSWDWRRSLFTQTGIKRMREQQPYDEITYAGPKRPKLTVPAGPTLAAGDAYNYWERKPLTSPGETLPTQTETETEAPEEEAQQEEVQEGLQLQQLWEQQLQQKRQLGVMFQQLLRLRTGAEIHPALA

SEQ ID NO: 286 - protein, 770 aa, Torque teno virus
MAAWWWGRRRRWRRWRRRRLPRRRRWRRRRRWPRRRRRRWPRRRRRRRPARRPRRRRRRRRVRRPRRRQKLVLTQWNPQTVRKCIIRGFVPLFQCSRTAYHRNFVDHMDDVYTTGPFGGGAGSMLFTLSFFYHEFKKHHCKWSASNRDFDLSRYRGAVLKFYRHPDVDYIVWLNRNPPFQENLLDAMSRQPLIMLQTHKCILVRSFKTHPRGPSYVRMKVRPPRLLTDKWYFQSDFCNVPLFQLQFALAELRFPIGSPQTNTTCVNFLVLDNRYHSFLDNKPQQSENSQRKERGHGYSFTGKEGEQDRLTFWQSLWNTGRFLNTTHINTLLPNISKLQDHKAEDTDANPDYKSLINGNKKVYNDSQYMQNVWQQGKINTLCNAIAQEQYRKIQKYYNTTYGQYQRQLFTGKKYWDYRVGTFSPTFLSPSRLNPEMPGAYTEIAYNPWTDEGTGNVVCLQYLTKETSDYKPHAGSKFTIEDVPLWIAMNGYVDICKKEGKDPGIRLNCLMCIRCPYTRPKLYNPRYPEELFVVYSYNFSHGRMPGGDKYIPMEFKDRWYPSLMHQEEVIEDIVRSGPFALKDQTDMVTCMMRYSALFNWGGNIIREQAVEDPCKKNTFALPGASGVARLLQVSNPIRQTPSTTWHSWDWRRSLFTQTGIKRMREQQPYDEITYAGPKRPKLTVPAGPTLAAGDAYNYWERKPLTSPGETLPTQTETETEAPEEEAQQEEVQEGLQLQQLWEQQLQQKRQLGVMFQQLLRLRTGAEIHPALA

SEQ ID NO: 287 - protein, 770 aa, Torque teno virus
MAAWWWGRRRRWRRWRRRRLPRRRRWRRRRRWPRRRRRRWPRRRRRRRPARRPRRRRRRRRVRRPRRRQKLVLTQWNPQTVRKCIIRGFVPLFQCSRTAYHRNFVDHMDDVYTTGPFGGGTGSMLFTLSFFYHEFKKHHCKWSASNRDFDLCRYRGTVLKFYRHPDVDYIVWLNRNPPFQENLLDAMSRQPLIMLQTHKCILVRSFKTHPRGPSYVRMKVRPPRLLTDKWYFQSDFCNVPLFQLQFALAELRFPIGSPQTNTTCVNFLVLDNRYHLFLDNKPRQSENLQRKERGHGYVFTGNEGEDDRLKFWHSLWSTGRFLNTTHINTLLPNISKLQDHEAEDTQAKTDYKSLINGNKKVYNDSQYMQDVWEQKKIQTLYKVIAEEQYRKIEKYYNTTYGQYQRQLFTGKKYWDYRVGMFSPTFLSPSRLNPEMPGAYTEIAYNPWTDEGTGNVVCLQYLTKETSDYKPHAGSKFTIEDVPLWIAMNGYVDICKKEGKDPGIRLNCLMCIRCPYTRPKLYNPRYPEELFVVYSYNFAHGRMPGGDKYIPMEFKDRWYPSLMHQEEVIEDIVRSGPFALKDQTEMVTCMMRYSALFNWGGNIIREQAVEDPCKKNTFALPGASGVARLLQVSNPIRQTPSTTWHSWDWRRSLFTQTGIKRMREQQPYDEITYAGPKRPKLTVPAGPTLAAGDAYNYWERKPLTSPGETLPTQTETETEAPEEEAQQEEVQEGLQLQQLWEQQLQQKRQLGVMFQQLLRLRTGAEIHPALA

SEQ ID NO: 288 - protein, 736 aa, Torque teno virus
MAAWWWGRRRRWRRWRRRRLPRRRRWRRRRRWPRRRRRRWPRRRRRRGPARRLRRRRRRRRVRRPRRRQKLVLTQWNPQTQRKCVVRGFLPLFFCGQGAYHRNFVEHMDDVFPKGPSGGGFGSMVWNLDFLYQEFKKHHNKWSSSNRDFDLVRCHGTVIKFYRHSDFDYLVHVTRTPPFKEDLLTIVSHQPGLMMQNYRCILVKSYKTHPGGRPYITPKIRPPRLLTDKWYFRPDFCGVPLFKLYVTLAELRFPICSPQTDTNCVTFLVLDNTYYDYLDNTADTTRDHERQQKWTNMKMTPRYHLTSHINTLFSGTQQMQSAKETGKDSQFRENIWKTAEVVKIIKDIASKNMQKQQTYYTKTYGAYATQYFTGKQYWDWRVGLFSPIFLSPSRLNPQEPGAYTEIAYNPWTDEGTGNIVCIQYLTKKDSHYKPGAGSKFAVTDVPLWAALFGYYDQCKKESKDANIRLNRLLLVRCPYTRPKLYNPRDPDQLFVMYSYNFGHGRMPGGDKYVPMEFKDRWYPCMLHQEEVVEEIVRCGPFAPKDMTPSVTCMARYSSLFTWGGNIIREQAVEDPCKKSTFAIPGAGGLARILQVSNPQRQAPTTTWHSWGWRRSLFTETGLKRMQEQQPYDEMSYTGPKRPKLSVPPAAEGNLAAGGGLFFRDGKQPASPGGSLPTQSETEAEAEDEEAHQEETEEGAQLQQLWEQQLQQKRELGIVFQHLLRLRQGAEIHPGLV

SEQ ID NO: 289 - protein, 736 aa, Torque teno virus
  MOD_RES 20: note = Any amino acid
MAAWWWGRRRRWRRWRRRRXPRRRRWRRRRRWPRRRRRRWPRRRRRRRPARRLRRRRRRRRVRRPRRRQKLVLTQWNPQTQRKCVVRGFLPLFFCGQGAYHRNFVEHMDDVFPKGPSGGGFGSMVWNLDFLYQEFKKHHNRWSSSNRDFDLVRYHGTVIKFYRHSDFDYLVHVTRTPPFKEDLLTIVSHQPGLMMQNYRCILVKSYKTHPGGRPYITLKIRPPRLLTDKWYFQPDFCGVPLFKLYVTLAELRFPICSPQTDTNCVTFLVLDNTYYDYLDSTADTTRDNERHQKWKNMIMTPRYHLTSHINTLFSGTQQMQNAKETGKDSQFRENIWKTEEVVKIIHDIASRNMQKQITYYTKTYGAYATQYFTGKQYWDWRVGLFSPIFLSPSRLNPQEPGAYTEIAYNPWTDEGTGNIVCIQYLTKKDSHYKPGAGSKFAVTDVPLWAALFGYYDQCKKESKDANIRLNCLLLVRCPYTRPKLYNPRDPDQLFVMYSYNFGHGRMPGGDKYVPMEFKDRWYPCMLHQEEVVEEIVRCGPFAPKDMTPSVTCMARYSSLFTWGGNIIREQAVEDPCKKSTFAIPGAGGLARILQVSNPQRQAPTTTWHLWDWRRSLFTETGLKRMQEQQPYDEMSYTGPKRPKLSVPPAAEGNLAAGGGLFFRDRKQPTSPGGSLPTQSETEAEAEDEEAHQEETEEGAQLQQLWEQQLQQKRELGIVFQHLLRLRQGAEIHPGLV

SEQ ID NO: 290 - protein, 733 aa, Torque teno virus
MAWWWWRRRRRPWRRRWRWKRRARVRTRRPRRAVRRRRRRVRRRRRGWRRLYRRWRRKGRRRRRRKKLVMKQWNPSTVSRCYIVGYLPIIIMGQGTASMNYASHSDDVYYPGPFGGGISSMRFTLRILYDQFMRGQNFWTKTNEDLDLARFLGSKWRFYRHKDVDFIVTYETSAPFTDSLESGPHQHPGIQMLMKNKILIPSFATKPKGRSSIKVRIQPPKLMIDKWYPQTDFCEVTLLTIHATACNLRFPFCSPQTDTSCVQFQVLSYNAYRQRISILPELCTREKLREFIKQVVKPNLTCINTLATPWCFKFPELDKLPPVANNATGWSVNPDSGDGDVIYQETTLETKWIANNDVWHTKDQRAHNNIHSQYGMPQSDALEHKTGYFSPALLSPQRLNPQIPGLYINIVYNPLTDKGEGNKIWCDPLTKNTFGYDPPKSKFLIENLPLWSAVTGYVDYCTKASKDESFKYNYRVLIQTPYTVPALYSDSETTKNRGYIPIGTDFAYGRMPGGVQQIPIRWRMRWYPMLFNQQPVLEDLFQSGPFAYQGDAKSATLVGKYAFKWLWGGNRIFQQVVRDPRSHQQDQSVGPSRQPRAVQVFDPKYQAPQWTFHAWDIRRGLFGRQAIKRVSAKPTPDELISTGPKRPRLEVPAFQEEQEKDLLFRQRKHKAWEDTTEEETEAPSEEEEENQELQLVRRLQQQRELGRGLRCLFQQLTRTQMGLHVDPQLLAPV

SEQ ID NO: 291 - protein, 744 aa, Torque teno virus 10
MAWGWWKRRRKWWWRRRWTRGRLRKRRARRAGRRPRRRRVRRRRAWRRGRRKRRTFRRRRRRKGRRHRTRLIIRQWQPEIVRKCLIIGYFPMIICGQGRWSENYSSHLEDRVVKQAFGGGHATTRWSLKVLYEENLRHLNFWTWTNRDLELARYLKVTWTFYRHQDVDFIIYFNRKSPMGGNIYTAPMMHPGALMLSKHKILVKSFKTKPKGKATVKVTIKPPTLLVDKWYFQKDICDMTLLNLNAVAADLRFPFCSPQTDNPCINFQVLSSVYNNFLSITDNRLTPVTDDGQAYYKAFLDAAFTKDRDFNAVNTFRTISNFSHPQLELPTKTTNTSQDQYFNTLDGYWGDPIYVHTQNIKPDQNLDKCKEILTNNMKNWHKKVKSENPSSLNHSCFAHNVGIFSSSFLSAGRLAPEVPGLYTDVIYNPYTDKGKGNMLWVDYCSKGDNLYKEGQSKCLLANLPLWMATNGYIDWVKKETDNWVINTQARVLMVCPYTYPKLYHEIQPLYGFVVYSYNFGEGKMPNGATYIPFKFRNKWYPTIYMQQAVLEDISRSGPFALKQQIPSATLTAKYKFKFLFGGNPTSEQVVRDPCTQPTFELPGASTQPPRIQVTDPKLLGPHYSFHSWDLRRGYYSTKSIKRMSEHEEPSEFIFPGPKKPRVDLGPIQQQERPSDSLQRESRPWETSEEESEAEVQQEETEEVPLRQQLLHNLREQQQLRKGLQCVFQQLIKTQQGVHIDPSLL

SEQ ID NO: 292 - protein, 219 aa, Torque teno virus
MAWSWWWRRRKRWWPRRRRRWRRFRTRRARRAVPRRRRRRRVRRRRWGRRGRRRRVFYKRRRRKTGRLYRKPKKKLVLTQWHPTTVRNCSIRGLVPLVLCGHTQGGRNFALRSDDYPKQGSPYGGSFSTTTWNLRVLFDEHQKHHNTWSYPNNQLDLGRYKGCTFCFYRGKKTDYIVKFQRRGPFKINKYSSPMAHPGMMMLDKMKILVPSFDTRPGGR

SEQ ID NO: 293 - protein, 219 aa, Torque teno virus; identical to SEQ ID NO: 292

SEQ ID NO: 294 - protein, 219 aa, Torque teno virus
MAWSWWWRRRKRWWPRRRRRWRRFRTRRARRAVPRRRRRRRVRRRRWGRRRRRRRVFYKRRRRKTGRLYRKPKKKLVLTQWHPTTVRNCSIRGLVPLVLCGHTQGGRNFALRSDDYPKQGSPYGGSFSTTTWNLRVLFDEHQKHHNTWSYPNNQLDLGRYKGCTFYFYRDKKTDYIVKFQRRGPFKINKYSSPMAHPGMMMLDKMKILVPSFDTRPGGR

SEQ ID NO: 295 - protein, 219 aa, Torque teno virus; identical to SEQ ID NO: 294

SEQ ID NO: 296 - protein, 469 aa, Torque teno virus
MYYGCIGINSTLTTKYENLFNKLYSKCCYFETFQTIAQLNPGFKAAKKTTNGSGSTAATLGDAVTELKNPNGTFYTGNNSTFGCCTYKPTKQIGSNANKWFWHQLTATDSDTLGQYGRASIQYMEYHTGIYSSIFLSPLRSNLELPTAYQDVTYNPLTDRGIGNRIWYQYSTKENTTFNETQCKCVLSDLPLWSMFYGYVDFIESELGISAEIHNFGIVCVQCPYTFPPMFDKSKPDKGYVFYDTLFGNGKMPDGSGHVPTYWQQRWWPRFSFQRQVMHDIILTGPFSYKDDSVMTGITAGYKFKFSWGGDMVSEQVIKNPERGDGRDSTYPDRQRRDSQVVDPRSMGPQWVFHTFDYRRGLFGKDAIKRVSEKPTDPDYFTTPYKKPRFFPPTAGEEKLQEEDSALQEKRSPLSSEEGQTRAQVLQQQVLQSELQQQQELGEQLRFLLREMFKTQAGIHMNPRAFQEL

SEQ ID NO: 297 - protein, 469 aa, Torque teno virus; identical to SEQ ID NO: 296

SEQ ID NO: 298 - protein, 469 aa, Torque teno virus
MYYDCIGINSTLTTKYENLFNKLYSKCCYFETFQTIAQLNPGFKAAKKTTNGSGSTAATLGDAVTELKNPNGTFYTGNNSTFGCCTYKPTKQIGSNANKWFWHQLTATDSDTLGQYGRASIQYMEYHTGIYSSIFLSPLRSNLEFPTAYQDVTYNPLTDRGIGNRIWYQYSTKENTTFNETQCKCVLSDLPLWSMFYGYVDFIESELGISAEIHNFGIVCVQCPYTFPPMFDKSKPDKGYVFYDTLFGNGKMPDGSGHVPTYWQQRWWPRFSFQRQVMHDIILTGPFSYKDDSVMTGITAGYKFKFSWGGDMVSEQVIKNSERGDGRDSTYPDRQRRDLQVVDPRSMGPQWVFHTFDYRRGLFGKDAIKRVSEKPTDPDYFTTPYKKPRFFPPTAGEEKLQEEDSALQEKRSPLSSEEGQTRAQVLQQQVLQSELQQQQELGEQLRFLLREMFKTQAGIHMNPRAFQEL

SEQ ID NO: 299 - protein, 469 aa, Torque teno virus; identical to SEQ ID NO: 298

SEQ ID NO: 300 - RNA, 76 nt, synthetic construct
  misc_feature 1..76: note = source = /note="Description of Artificial Sequence: Syntheticoligonucleotide"
  source 1..76: mol_type = other RNA
gccattttaagtagctgacgtcaaggattgacgtaaaggttaaaggtcatcctcggcggaagctacacaaaatggt

SEQ ID NO: 301 - RNA, 78 nt, synthetic construct
  misc_feature 1..78: note = source = /note="Description of Artificial Sequence: Syntheticoligonucleotide"
  source 1..78: mol_type = other RNA
gcgtacgtcacaagtcacgtggaggggacccgctgtaacccggaagtaggccccgtcacgtgacttaccacgtgtgta

SEQ ID NO: 302 - RNA, 77 nt, synthetic construct
  misc_feature 1..77: note = source = /note="Description of Artificial Sequence: Syntheticoligonucleotide"
  source 1..77: mol_type = other RNA
gccattttaagtagctgacgtcaaggattgacgtgaaggttaaaggtcatcctcggcggaagctacacaaaatggtg

SEQ ID NO: 303 - RNA, 78 nt, synthetic construct
  misc_feature 1..78: note = source = /note="Description of Artificial Sequence: Syntheticoligonucleotide"
  source 1..78: mol_type = other RNA
gcacacgtcataagtcacgtggtggggacccgctgtaacccggaagtaggccccgtcacgtgatttgtcacgtgtgta

SEQ ID NO: 304 - RNA, 66 nt, synthetic construct
  misc_feature 1..66: note = source = /note="Description of Artificial Sequence: Syntheticoligonucleotide"
  source 1..66: mol_type = other RNA
cttccgggtcataggtcacacctacgtcacaagtcacgtggggagggttggcgtatagcccggaag

SEQ ID NO: 305 - RNA, 68 nt, synthetic construct
  misc_feature 1..68: note = source = /note="Description of Artificial Sequence: Syntheticoligonucleotide"
  source 1..68: mol_type = other RNA
gccggggggctgccgccccccccggggaaaggggggggccccccccgggggggggtttgccccccggc

SEQ ID NO: 306 - RNA, 78 nt, synthetic construct
  misc_feature 1..78: note = source = /note="Description of Artificial Sequence: Syntheticoligonucleotide"
  source 1..78: mol_type = other RNA
atacgtcatcagtcacgtgggggaaggcgtgcctaaacccggaagcatcctcgtccacgtgactgtgacgtgtgtggc

SEQ ID NO: 307 - RNA, 73 nt, synthetic construct
  misc_feature 1..73: note = source = /note="Description of Artificial Sequence: Syntheticoligonucleotide"
  source 1..73: mol_type = other RNA
cattttaagtaaggcggaagcagctcggcgtacacaaaatggcggcggagcacttccggcttgcccaaaatgg

SEQ ID NO: 308 - RNA, 71 nt, synthetic construct
  misc_feature 1..71: note = source = /note="Description of Artificial Sequence: Syntheticoligonucleotide"
  source 1..71: mol_type = other RNA
gtcacaagtcacgtggggagggttggcgtttaacccggaagccaatcctcttacgtggcctgtcacgtgac

SEQ ID NO: 309 - RNA, 70 nt, synthetic construct
  misc_feature 1..70: note = source = /note="Description of Artificial Sequence: Syntheticoligonucleotide"
  source 1..70: mol_type = other RNA
cgaccgcgtcccgaaggcgggtacccgaggtgagtttacacaccgaggttaagggccaattcgggcttgg

SEQ ID NO: 310 - RNA, 59 nt, synthetic construct
  misc_feature 1..59: note = source = /note="Description of Artificial Sequence: Syntheticoligonucleotide"
  source 1..59: mol_type = other RNA
cgcggtatcgtagccgacgcggaccccgttttcggggcccccgcggggctctcggcgcg

SEQ ID NO: 311 - RNA, 78 nt, synthetic construct
  misc_feature 1..78: note = source = /note="Description of Artificial Sequence: Syntheticoligonucleotide"
  source 1..78: mol_type = other RNA
cgccattttgtgatacgcgcgtcccctcccggcttccgtacaacgtcaggcggggcgtggccgtatcagaaaatggcg

SEQ ID NO: 312 - RNA, 77 nt, synthetic construct
  misc_feature 1..77: note = source = /note="Description of Artificial Sequence: Syntheticoligonucleotide"
  source 1..77: mol_type = other RNA
gctacgtcataagtcacgtgactgggcaggtactaaacccggaagtatcctcggtcacgtggcctgtcacgtagttg

SEQ ID NO: 313 - RNA, 80 nt, synthetic construct
  misc_feature 1..80: note = source = /note="Description of Artificial Sequence: Syntheticoligonucleotide"
  source 1..80: mol_type = other RNA
ggctstgacgtcaaagtcacgtgggragggtggcgttaaacccggaagtcatcctcgtcacgtgacctgacgtcacagcc

SEQ ID NO: 314 - RNA, 66 nt, synthetic construct
  misc_feature 1..66: note = source = /note="Description of Artificial Sequence: Syntheticoligonucleotide"
  source 1..66: mol_type = other RNA
gcccgtccgcggcgagagcgcgagcgaagcgagcgatcgagcgtcccgtgggcgggtgccgaaggt

SEQ ID NO: 315 - RNA, 80 nt, synthetic construct
  misc_feature 1..80: note = source = /note="Description of Artificial Sequence: Syntheticoligonucleotide"
  source 1..80: mol_type = other RNA
ggttgtgacgtcaaagtcacgtggggagggcggcgttaaacccggaagtcatcctcgtcacgtgacctgacgtcacggcc

SEQ ID NO: 316 - RNA, 67 nt, synthetic construct
  misc_feature 1..67: note = source = /note="Description of Artificial Sequence: Syntheticoligonucleotide"
  source 1..67: mol_type = other RNA
gcccgtccgcggcgagagcgcgagcgaagcgagcgatcgagcgtcccgtgggcgggtgccgtaggtg

SEQ ID NO: 317 - RNA, 67 nt, synthetic construct; identical to SEQ ID NO: 316
  misc_feature 1..67: note = source = /note="Description of Artificial Sequence: Syntheticoligonucleotide"
  source 1..67: mol_type = other RNA

SEQ ID NO: 318 - RNA, 80 nt, synthetic construct
  misc_feature 1..80: note = source = /note="Description of Artificial Sequence: Syntheticoligonucleotide"
  source 1..80: mol_type = other RNA
ggctgtgacgtcaaagtcacgtggggagggcggcgttaaacccggaagtcatcctcgtcacgtgacctgacgtcacggcc

SEQ ID NO: 319 - RNA, 79 nt, synthetic construct
  misc_feature 1..79: note = source = /note="Description of Artificial Sequence: Syntheticoligonucleotide"
  source 1..79: mol_type = other RNA
agaccacgtggtaagtcacgtgggggcagctgctgtaaacccggaagtagctgacccgcgtgactggtcacgtgacctg

SEQ ID NO: 320 - RNA, 78 nt, synthetic construct
  misc_feature 1..78: note = source = /note="Description of Artificial Sequence: Syntheticoligonucleotide"
  source 1..78: mol_type = other RNA
cgccattttataatacgcgcgtcccctcccggcttccgtactacgtcaggcggggcgtggccgtattagaaaatggtg

SEQ ID NO: 321 - RNA, 72 nt, synthetic construct
  misc_feature 1..72: note = source = /note="Description of Artificial Sequence: Syntheticoligonucleotide"
  source 1..72: mol_type = other RNA
taagtaaggcggaaccaggctgtcaccctgtgtcaaaggtcaagggacagccttccggcttgcacaaaatgg

SEQ ID NO: 322 - RNA, 78 nt, synthetic construct
  misc_feature 1..78: note = source = /note="Description of Artificial Sequence: Syntheticoligonucleotide"
  source 1..78: mol_type = other RNA
tgcctacgtcataagtcacgtggggacggctgctgtaaacacggaagtagctgacccgcgtgacttgtcacgtgagca

SEQ ID NO: 323 - RNA, 72 nt, synthetic construct
  misc_feature 1..72: note = source = /note="Description of Artificial Sequence: Syntheticoligonucleotide"
  source 1..72: mol_type = other RNA
ttgtgtaaggcggaacaggctgacaccccgtgtcaaaggtcaggggtcagcctccgctttgcaccaaatggt

SEQ ID NO: 324 - RNA, 79 nt, synthetic construct
  misc_feature 1..79: note = source = /note="Description of Artificial Sequence: Syntheticoligonucleotide"
  source 1..79: mol_type = other RNA
tacctacgtcataagtcacgtgggaagagctgctgtgaacctggaagtagctgacccgcgtggcttgtcacgtgagtgc

SEQ ID NO: 325 - RNA, 75 nt, synthetic construct
  misc_feature 1..75: note = source = /note="Description of Artificial Sequence: Syntheticoligonucleotide"
  source 1..75: mol_type = other RNA
ttttcctggcccgtccgcggcgagagcgcgagcgaagcgagcgatcgggcgtcccgagggcgggtgccggaggtg

SEQ ID NO: 326 - RNA, 68 nt, synthetic construct
  misc_feature 1..68: note = source = /note="Description of Artificial Sequence: Syntheticoligonucleotide"
  source 1..68: mol_type = other RNA
aaagtgagtggggccagacttcgccatagggcctttaacttccgggtgcgtctgggggccgccatttt

SEQ ID NO: 327 - RNA, 73 nt, synthetic construct
  misc_feature 1..73: note = source = /note="Description of Artificial Sequence: Syntheticoligonucleotide"
  source 1..73: mol_type = other RNA
gtgacgttactctcacgtgatgggggcgtgctctaacccggaagcatcctcgaccacgtgactgtgacgtcac

SEQ ID NO: 328 - RNA, 75 nt, synthetic construct
  misc_feature 1..75: note = source = /note="Description of Artificial Sequence: Syntheticoligonucleotide"
  source 1..75: mol_type = other RNA
agcgtctactacgtacacttcctggggtgtgtcctgccactgtatataaaccagaggggtgacgaatggtagagt

SEQ ID NO: 329 - RNA, 73 nt, synthetic construct
  misc_feature 1..73: note = source = /note="Description of Artificial Sequence: Syntheticoligonucleotide"
  source 1..73: mol_type = other RNA
gtgacgtcaaagtcacgtggtgacggccattttaacccggaagtggctgttgtcacgtgacttgacgtcacgg

SEQ ID NO: 330 - RNA, 62 nt, synthetic construct
  misc_feature 1..62: note = source = /note="Description of Artificial Sequence: Syntheticoligonucleotide"
  source 1..62: mol_type = other RNA
gctttagacgccattttaggccctcgcgggcacccgtaggcgcgttttaatgacgtcacggc

SEQ ID NO: 331 - RNA, 73 nt, synthetic construct
  misc_feature 1..73: note = source = /note="Description of Artificial Sequence: Syntheticoligonucleotide"
  source 1..73: mol_type = other RNA
cacccgtaggcgcgttttaatgacgtcacggcagccattttgtcgtgacgtttgagacacgtgatgggggcgt

SEQ ID NO: 332 - RNA, 80 nt, synthetic construct
  misc_feature 1..80: note = source = /note="Description of Artificial Sequence: Syntheticoligonucleotide"
  source 1..80: mol_type = other RNA
gtcgtgacgtttgagacacgtgatgggggcgtgcctaaacccggaagcatccctggtcacgtgactctgacgtcacggcg

SEQ ID NO: 333 - RNA, 77 nt, synthetic construct
  misc_feature 1..77: note = source = /note="Description of Artificial Sequence: Syntheticoligonucleotide"
  source 1..77: mol_type = other RNA
cgaaagtgagtggggccagacttcgccataaggcctttaacttccgggtgcgtgtgggggccgccattttagcttcg

SEQ ID NO: 334 - RNA, 76 nt, synthetic construct
  misc_feature 1..76: note = source = /note="Description of Artificial Sequence: Syntheticoligonucleotide"
  source 1..76: mol_type = other RNA
ctgtgacgtcaaagtcacgtggggagggcggcgtgtaacccggaagtcatcctcgtcacgtgacctgacgtcacgg

SEQ ID NO: 335 - RNA, 73 nt, synthetic construct
  misc_feature 1..73: note = source = /note="Description of Artificial Sequence: Syntheticoligonucleotide"
  source 1..73: mol_type = other RNA
ctgtccgccatcttgtgacttccttccgctttttcaaaaaaaaagaggaagtatgacgtagcggcgggggggc

SEQ ID NO: 336 - RNA, 67 nt, synthetic construct
  misc_feature 1..67: note = source = /note="Description of Artificial Sequence: Syntheticoligonucleotide"
  source 1..67: mol_type = other RNA
ggtagagttttttccgcccgtccgcagcgaggacgcgagcgcagcgagcggccgagcgacccgtggg

SEQ ID NO: 337 - RNA, 80 nt, synthetic construct
  misc_feature 1..80: note = source = /note="Description of Artificial Sequence: Syntheticoligonucleotide"
  source 1..80: mol_type = other RNA
gctgtgacgtttcagtcacgtggggagggaacgcctaaacccggaagcgtccctggtcacgtgattgtgacgtcacggcc

SEQ ID NO: 338 - RNA, 63 nt, synthetic construct
  misc_feature 1..63: note = source = /note="Description of Artificial Sequence: Syntheticoligonucleotide"
  source 1..63: mol_type = other RNA
ccgccattttgtgacttccttccgctttttcaaaaaaaaagaggaagtgtgacgtagcggcgg

SEQ ID NO: 339 - RNA, 78 nt, synthetic construct
  misc_feature 1..78: note = source = /note="Description of Artificial Sequence: Syntheticoligonucleotide"
  source 1..78: mol_type = other RNA
gactgtgacgtcaaagtcacgtggggagggcggcgtgtaacccggaagtcatcctcgtcacgtgacctgacgtcacgg

SEQ ID NO: 340 - RNA, 73 nt, synthetic construct
  misc_feature 1..73: note = source = /note="Description of Artificial Sequence: Syntheticoligonucleotide"
  source 1..73: mol_type = other RNA
ctgtccgccatcttgtgacttccttccgctttttcaaaaaaaaagaggaagtatgacgtggcggcgggggggc

SEQ ID NO: 341 - RNA, 80 nt, synthetic construct
  misc_feature 1..80: note = source = /note="Description of Artificial Sequence: Syntheticoligonucleotide"
  source 1..80: mol_type = other RNA
ggttgtgacgtcaaagtcacgtggggagggcggcgtgtaacccggaagtcatcctcgtcacgtgacctgacgtcacggcc

SEQ ID NO: 342 - RNA, 65 nt, synthetic construct
  misc_feature 1..65: note = source = /note="Description of Artificial Sequence: Syntheticoligonucleotide"
  source 1..65: mol_type = other RNA
cccgccatcttgtgacttccttccgctttttcaaaaaaaaagaggaagtgtgacgtagcggcggg

SEQ ID NO: 343 - RNA, 67 nt, synthetic construct; identical to SEQ ID NO: 316
  misc_feature 1..67: note = source = /note="Description of Artificial Sequence: Syntheticoligonucleotide"
  source 1..67: mol_type = other RNA

SEQ ID NO: 344 - RNA, 78 nt, synthetic construct
  misc_feature 1..78: note = source = /note="Description of Artificial Sequence: Syntheticoligonucleotide"
  source 1..78: mol_type = other RNA
gactgtgacgtcaaagtcacgtggggaggagggcgtgtaacccggaagtcatcctcgtcacgtgacctgacgtcacgg

SEQ ID NO: 345 - RNA, 62 nt, synthetic construct
  misc_feature 1..62: note = source = /note="Description of Artificial Sequence: Syntheticoligonucleotide"
  source 1..62: mol_type = other RNA
tcgcgtcttagtgacgtcacggcagccatcttggtcctgacgtcactgtcacgtggggaggg

SEQ ID NO: 346 - RNA, 76 nt, synthetic construct
  misc_feature 1..76: note = source = /note="Description of Artificial Sequence: Syntheticoligonucleotide"
  source 1..76: mol_type = other RNA
tgacgtcactgtcacgtggggagggaacacgtgaacccggaagtgtccctggtcacgtgacatgacgtcacggccg

SEQ ID NO: 347 - RNA, 78 nt, synthetic construct
  misc_feature 1..78: note = source = /note="Description of Artificial Sequence: Syntheticoligonucleotide"
  source 1..78: mol_type = other RNA
cgccattttaagtaagcatggcgggcggtgatgtcaaatgttaaaggtcacagccggtcatgcttgcacaaaatggcg

SEQ ID NO: 348 - RNA, 78 nt, synthetic construct
  misc_feature 1..78: note = source = /note="Description of Artificial Sequence: Syntheticoligonucleotide"
  source 1..78: mol_type = other RNA
cgccattttaagtaagcatggcgggcggtgacgtgcaatgtcaaaggtcacagcctgtcatgcttgcacaaaatggcg

SEQ ID NO: 349 - RNA, 72 nt, synthetic construct
  misc_feature 1..72: note = source = /note="Description of Artificial Sequence: Syntheticoligonucleotide"
  source 1..72: mol_type = other RNA
ccatcttaagtagttgaggcggacggtggcgtcggttcaaaggtcaccatcagccacacctactcaaaatgg

SEQ ID NO: 350 - RNA, 67 nt, synthetic construct
  misc_feature 1..67: note = source = /note="Description of Artificial Sequence: Syntheticoligonucleotide"
  source 1..67: mol_type = other RNA
gcctgtcatgcttgcacaaaatggcggacttccgcttccgggtcgccgccatatttggtcacgtgac

SEQ ID NO: 351 - RNA, 76 nt, synthetic construct; identical to SEQ ID NO: 300
  misc_feature 1..76: note = source = /note="Description of Artificial Sequence: Syntheticoligonucleotide"
  source 1..76: mol_type = other RNA

SEQ ID NO: 352 - RNA, 76 nt, synthetic construct; identical to SEQ ID NO: 300
  misc_feature 1..76: note = source = /note="Description of Artificial Sequence: Syntheticoligonucleotide"
  source 1..76: mol_type = other RNA

SEQ ID NO: 353 - RNA, 78 nt, synthetic construct
  misc_feature 1..78: note = source = /note="Description of Artificial Sequence: Syntheticoligonucleotide"
  source 1..78: mol_type = other RNA
gcatacgtcacaagtcacgtgggggggacccgctgtaacccggaagtaggccccgtcacgtgacttaccacgtgtgta

SEQ ID NO: 354 - RNA, 76 nt, synthetic construct
  misc_feature 1..76: note = source = /note="Description of Artificial Sequence: Syntheticoligonucleotide"
  source 1..76: mol_type = other RNA
gccattttaagtagctgacgtcaaggattgacgtgaaggttaaaggtcatcctcggcggaagctacacaaaatggt

SEQ ID NO: 355 - RNA, 78 nt, synthetic construct; identical to SEQ ID NO: 303
  misc_feature 1..78: note = source = /note="Description of Artificial Sequence: Syntheticoligonucleotide"
  source 1..78: mol_type = other RNA

SEQ ID NO: 356 - RNA, 76 nt, synthetic construct
  misc_feature 1..76: note = source = /note="Description of Artificial Sequence: Syntheticoligonucleotide"
  source 1..76: mol_type = other RNA
gccattttaagtcagctctggggaggcgtgacttccagttcaaaggtcatcctcaccataactggcacaaaatggc

SEQ ID NO: 357 - RNA, 76 nt, synthetic construct; identical to SEQ ID NO: 300
  misc_feature 1..76: note = source = /note="Description of Artificial Sequence: Syntheticoligonucleotide"
  source 1..76: mol_type = other RNA

SEQ ID NO: 358 - RNA, 78 nt, synthetic construct
  misc_feature 1..78: note = source = /note="Description of Artificial Sequence: Syntheticoligonucleotide"
  source 1..78: mol_type = other RNA
gcatacgtcacaagtcacgtggaggggacacgctgtaacccggaagtaggccccgtcacgtgacttaccacgtgtgta

SEQ ID NO: 359 - RNA, 79 nt, synthetic construct
  misc_feature 1..79: note = source = /note="Description of Artificial Sequence: Syntheticoligonucleotide"
  source 1..79: mol_type = other RNA
gcgccatgttaagtggctgtcgccgaggattgacgtcacagttcaaaggtcatcctcgacggtaaccgcaaacatggcg

SEQ ID NO: 360 - RNA, 76 nt, synthetic construct
  misc_feature 1..76: note = source = /note="Description of Artificial Sequence: Syntheticoligonucleotide"
  source 1..76: mol_type = other RNA
catgcgtcataagtcacatgacaggggtccacttaaacacggaagtaggccccgacatgtgactcgtcacgtgtgt

SEQ ID NO: 361 - RNA, 73 nt, synthetic construct
  misc_feature 1..73: note = source = /note="Description of Artificial Sequence: Syntheticoligonucleotide"
  source 1..73: mol_type = other RNA
tggcagcacttccgaatggctgagttttccacgcccgtccgcggagagggagccacggaggtgatcccgaacg

SEQ ID NO: 362 - RNA, 78 nt, synthetic construct
  misc_feature 1..78: note = source = /note="Description of Artificial Sequence: Syntheticoligonucleotide"
  source 1..78: mol_type = other RNA
gccattttaagtcagcgctggggaggcatgactgtaagttcaaaggtcatcctcaccggaactgacacaaaatggccg

SEQ ID NO: 363 - RNA, 80 nt, synthetic construct
  misc_feature 1..80: note = source = /note="Description of Artificial Sequence: Syntheticoligonucleotide"
  source 1..80: mol_type = other RNA
gccatcttaagtggctgtcgccgaggattgacgtcacagttcaaaggtcatcctcggcggtaaccgcaaagatggcggtc

SEQ ID NO: 364 - RNA, 76 nt, synthetic construct
  misc_feature 1..76: note = source = /note="Description of Artificial Sequence: Syntheticoligonucleotide"
  source 1..76: mol_type = other RNA
atacgtcataagtcacatgtctaggggtccacttaaacacggaagtaggccccgacatgtgactcgtcacgtgtgt

SEQ ID NO: 365 - RNA, 77 nt, synthetic construct
  misc_feature 1..77: note = source = /note="Description of Artificial Sequence: Syntheticoligonucleotide"
  source 1..77: mol_type = other RNA
ccattttaagtaaggcggaagcagctgtccctgtaacaaaatggcggcgacagccttccgctttgcacaaaatggag

SEQ ID NO: 366 - RNA, 80 nt, synthetic construct
  misc_feature 1..80: note = source = /note="Description of Artificial Sequence: Syntheticoligonucleotide"
  source 1..80: mol_type = other RNA
gccatcttaagtggctgtcgctgaggattgacgtcacagttcaaaggtcatcctcggcggtaaccgcaaagatggcggtc

SEQ ID NO: 367 - RNA, 76 nt, synthetic construct
  misc_feature 1..76: note = source = /note="Description of Artificial Sequence: Syntheticoligonucleotide"
  source 1..76: mol_type = other RNA
catacgtcataagtcacatgacaggagtccacttaaacacggaagtaggccccgacatgtgactcgtcacgtgtgt

SEQ ID NO: 368 - RNA, 80 nt, synthetic construct
  misc_feature 1..80: note = source = /note="Description of Artificial Sequence: Syntheticoligonucleotide"
  source 1..80: mol_type = other RNA
cgccatcttaagtggctgtcgccgaggattggcgtcacagttcaaaggtcatcctcggcggtaaccgcaaagatggcggt

SEQ ID NO: 369 - RNA, 76 nt, synthetic construct
  misc_feature 1..76: note = source = /note="Description of Artificial Sequence: Syntheticoligonucleotide"
  source 1..76: mol_type = other RNA
catacgtcataagtcacatgacaggggtccacttaaacacggaagtaggccccgacatgtgactcgtcacgtgtgt

SEQ ID NO: 370 - RNA, 78 nt, synthetic construct
  misc_feature 1..78: note = source = /note="Description of Artificial Sequence: Syntheticoligonucleotide"
  source 1..78: mol_type = other RNA
gcatacgtcacaagtcacgtgggggggacccgctgtaacccggaagtaggccccgtcacgtgacttaccacgtggtgt

SEQ ID NO: 371 - RNA, 77 nt, synthetic construct
  misc_feature 1..77: note = source = /note="Description of Artificial Sequence: Syntheticoligonucleotide"
  source 1..77: mol_type = other RNA
ccgccattttaggctgttgccgggcgtttgacttccgtgttaaaggtcaaacacccagcgacaccaaaaaatggccg

SEQ ID NO: 372 - RNA, 77 nt, synthetic construct
  misc_feature 1..77: note = source = /note="Description of Artificial Sequence: Syntheticoligonucleotide"
  source 1..77: mol_type = other RNA
ctacgtcataagtcacgtgacagggaggggcgacaaacccggaagtcatcctcgcccacgtgacttaccacgtggtg

SEQ ID NO: 373 - RNA, 77 nt, synthetic construct
  misc_feature 1..77: note = source = /note="Description of Artificial Sequence: Syntheticoligonucleotide"
  source 1..77: mol_type = other RNA
gccattttaagtaggtgacgtccaggactgacgtaaagttcaaaggtcatcctcggcggaacctatacaaaatggcg

SEQ ID NO: 374 - RNA, 76 nt, synthetic construct
  misc_feature 1..76: note = source = /note="Description of Artificial Sequence: Syntheticoligonucleotide"
  source 1..76: mol_type = other RNA
ctacgtcataagtcacgtggggacggctgtacttaaacacggaagtaggccccgtcacgtgatttaccacgtggtg

SEQ ID NO: 375 - RNA, 73 nt, synthetic construct
  misc_feature 1..73: note = source = /note="Description of Artificial Sequence: Syntheticoligonucleotide"
  source 1..73: mol_type = other RNA
gccattttaagtaaggcggaagagctctagctatacaaaatggcggcggagcacttccgctttgcccaaaatg

SEQ ID NO: 376 - RNA, 77 nt, synthetic construct
  misc_feature 1..77: note = source = /note="Description of Artificial Sequence: Syntheticoligonucleotide"
  source 1..77: mol_type = other RNA
gccattttaagtagctgacgtcaaggattgacgtagaggttaaaggtcatcctcggcggaagctacacaaaatggtg

SEQ ID NO: 377 - RNA, 78 nt, synthetic construct; identical to SEQ ID NO: 353
  misc_feature 1..78: note = source = /note="Description of Artificial Sequence: Syntheticoligonucleotide"
  source 1..78: mol_type = other RNA

SEQ ID NO: 378 - RNA, 80 nt, synthetic construct
  misc_feature 1..80: note = source = /note="Description of Artificial Sequence: Syntheticoligonucleotide"
  source 1..80: mol_type = other RNA
ggcgccattttaagtaagcatggcgggcggcgacgtcacatgtcaaaggtcaccgcacttccgtgcttgcacaaaatggc

SEQ ID NO: 379 - RNA, 73 nt, synthetic construct
  misc_feature 1..73: note = source = /note="Description of Artificial Sequence: Syntheticoligonucleotide"
  source 1..73: mol_type = other RNA
tgctacgtcatcgagacacgtggtgccagcagctgtaaacccggaagtcgctgacacacgtgtcttgtcacgt

SEQ ID NO: 380 - RNA, 78 nt, synthetic construct
  misc_feature 1..78: note = source = /note="Description of Artificial Sequence: Syntheticoligonucleotide"
  source 1..78: mol_type = other RNA
gccattttaagtaagcaccgcctagggatgacgtataagttcaaaggtcatcctcagccggaacttacacaaaatggt

SEQ ID NO: 381 - RNA, 72 nt, synthetic construct
  misc_feature 1..72: note = source = /note="Description of Artificial Sequence: Syntheticoligonucleotide"
  source 1..72: mol_type = other RNA
acgtcatatgtcacgtggggaggccctgctgcgcaaacgcggaagtaggccccgtcacgtgtcataccacgt

SEQ ID NO: 382 - RNA, 77 nt, synthetic construct
  misc_feature 1..77: note = source = /note="Description of Artificial Sequence: Syntheticoligonucleotide"
  source 1..77: mol_type = other RNA
ccattttaagtaaggcggaagcagctccactttctcacaaaatggcggcggggcacttccggcttgcccaaaatggc

SEQ ID NO: 383 - RNA, 72 nt, synthetic construct
  misc_feature 1..72: note = source = /note="Description of Artificial Sequence: Syntheticoligonucleotide"
  source 1..72: mol_type = other RNA
ccattttaagtaaggcggaagtttctccactatacaaaatggcggcggagcacttccggcttgcccaaaatg

SEQ ID NO: 384 - RNA, 72 nt, synthetic construct
  misc_feature 1..72: note = source = /note="Description of Artificial Sequence: Syntheticoligonucleotide"
  source 1..72: mol_type = other RNA
ccatcttaagtagttgaggcggacggtggcgtgagttcaaaggtcaccatcagccacacctactcaaaatgg

SEQ ID NO: 385 - RNA, 76 nt, synthetic construct
  misc_feature 1..76: note = source = /note="Description of Artificial Sequence: Syntheticoligonucleotide"
  source 1..76: mol_type = other RNA
cgccatcttaagtagttgaggcggacggtggcgtgagttcaaaggtcaccatcagccacacctactcaaaatggtg

SEQ ID NO: 386 - RNA, 73 nt, synthetic construct
  misc_feature 1..73: note = source = /note="Description of Artificial Sequence: Syntheticoligonucleotide"
  source 1..73: mol_type = other RNA
tttcggaccttcggcgtcgggggggtcgggggctttactaaacagactccgagatgccattggacactgaggg

SEQ ID NO: 387 - RNA, 76 nt, synthetic construct
  misc_feature 1..76: note = source = /note="Description of Artificial Sequence: Syntheticoligonucleotide"
  source 1..76: mol_type = other RNA
ccattttaagtaggtgccgtccagcactgctgttccgggttaaagggcatcctcggcggaacctatacaaaatggc

SEQ ID NO: 388 - RNA, 73 nt, synthetic construct
  misc_feature 1..73: note = source = /note="Description of Artificial Sequence: Syntheticoligonucleotide"
  source 1..73: mol_type = other RNA
ctacgtcatcgatgacgtggggaggcgtactatgaaacgcggaagtaggccccgctacgtcatcatcacgtgg

SEQ ID NO: 389 - RNA, 73 nt, synthetic construct
  misc_feature 1..73: note = source = /note="Description of Artificial Sequence: Syntheticoligonucleotide"
  source 1..73: mol_type = other RNA
ccattttaagtaaggcggaagagctgctctatatacaaaatggcggaggagcacttccggcttgcccaaaatg

SEQ ID NO: 390 - RNA, 75 nt, synthetic construct
  misc_feature 1..75: note = source = /note="Description of Artificial Sequence: Syntheticoligonucleotide"
  source 1..75: mol_type = other RNA
tgcctacgtaacaagtcacgtggggagggttggcgtataacccggaagtcaatcctcccacgtggcctgtcacgt

SEQ ID NO: 391 - RNA, 72 nt, synthetic construct
  misc_feature 1..72: note = source = /note="Description of Artificial Sequence: Syntheticoligonucleotide"
  source 1..72: mol_type = other RNA
taagtaaggcggaaccaggctgtcaccccgtgtcaaaggtcaggggtcagccttccgctttacacaaaatgg

SEQ ID NO: 392 - RNA, 72 nt, synthetic construct; identical to SEQ ID NO: 391
  misc_feature 1..72: note = source = /note="Description of Artificial Sequence: Syntheticoligonucleotide"
  source 1..72: mol_type = other RNA

SEQ ID NO: 393 - RNA, 80 nt, synthetic construct
  misc_feature 1..80: note = source = /note="Description of Artificial Sequence: Syntheticoligonucleotide"
  source 1..80: mol_type = other RNA
gcagccattttaagtcagcttcggggagggtcacgcaaagttcaaaggtcatcctcaccggaactggtacaaaatggccg

SEQ ID NO: 394 - RNA, 74 nt, synthetic construct
  misc_feature 1..74: note = source = /note="Description of Artificial Sequence: Syntheticoligonucleotide"
  source 1..74: mol_type = other RNA
tgctacgtcataagtgacgtagctggtgtctgctgtaaacacggaagtaggccccgccacgtcacttgtcacgt

SEQ ID NO: 395 - RNA, 23 nt, synthetic construct
  misc_feature 1..23: note = source = /note="Description of Artificial Sequence: Syntheticoligonucleotide"
  source 1..23: mol_type = other RNA
agtagctgacgtcaaggattgac

SEQ ID NO: 396 - RNA, 22 nt, synthetic construct
  misc_feature 1..22: note = source = /note="Description of Artificial Sequence: Syntheticoligonucleotide"
  source 1..22: mol_type = other RNA
caagtcacgtggaggggacccg

SEQ ID NO: 397 - RNA, 25 nt, synthetic construct
  misc_feature 1..25: note = source = /note="Description of Artificial Sequence: Syntheticoligonucleotide"
  source 1..25: mol_type = other RNA
aagtagctgacgtcaaggattgacg

SEQ ID NO: 398 - RNA, 23 nt, synthetic construct
  misc_feature 1..23: note = source = /note="Description of Artificial Sequence: Syntheticoligonucleotide"
  source 1..23: mol_type = other RNA
ataagtcacgtggtggggacccg

SEQ ID NO: 399 - RNA, 26 nt, synthetic construct
  misc_feature 1..26: note = source = /note="Description of Artificial Sequence: Syntheticoligonucleotide"
  source 1..26: mol_type = other RNA
tggggagggttggcgtatagcccgga

SEQ ID NO: 400 - RNA, 24 nt, synthetic construct
  misc_feature 1..24: note = source = /note="Description of Artificial Sequence: Syntheticoligonucleotide"
  source 1..24: mol_type = other RNA
ccccccccgggggggggtttgccc

SEQ ID NO: 401 - RNA, 25 nt, synthetic construct
  misc_feature 1..25: note = source = /note="Description of Artificial Sequence: Syntheticoligonucleotide"
  source 1..25: mol_type = other RNA
atcagtcacgtgggggaaggcgtgc

SEQ ID NO: 402 - RNA, 22 nt, synthetic construct
  misc_feature 1..22: note = source = /note="Description of Artificial Sequence: Syntheticoligonucleotide"
  source 1..22: mol_type = other RNA
aagtaaggcggaagcagctcgg

SEQ ID NO: 403 - RNA, 21 nt, synthetic construct
  misc_feature 1..21: note = source = /note="Description of Artificial Sequence: Syntheticoligonucleotide"
  source 1..21: mol_type = other RNA
agtcacgtggggagggttggc

SEQ ID NO: 404 - RNA, 22 nt, synthetic construct
  misc_feature 1..22: note = source = /note="Description of Artificial Sequence: Syntheticoligonucleotide"
  source 1..22: mol_type = other RNA
cccgaaggcgggtacccgaggt

SEQ ID NO: 405 - RNA, 23 nt, synthetic construct
  misc_feature 1..23: note = source = /note="Description of Artificial Sequence: Syntheticoligonucleotide"
  source 1..23: mol_type = other RNA
tatcgtagccgacgcggaccccg

SEQ ID NO: 406 - RNA, 26 nt, synthetic construct
  misc_feature 1..26: note = source = /note="Description of Artificial Sequence: Syntheticoligonucleotide"
  source 1..26: mol_type = other RNA
attttgtgatacgcgcgtcccctccc

SEQ ID NO: 407 - RNA, 21 nt, synthetic construct
  misc_feature 1..21: note = source = /note="Description of Artificial Sequence: Syntheticoligonucleotide"
  source 1..21: mol_type = other RNA
aagtcacgtgactgggcaggt

SEQ ID NO: 408 - RNA, 26 nt, synthetic construct
  misc_feature 1..26: note = source = /note="Description of Artificial Sequence: Syntheticoligonucleotide"
  source 1..26: mol_type = other RNA
tgacgtcaaagtcacgtgggragggt

SEQ ID NO: 409 - RNA, 23 nt, synthetic construct
  misc_feature 1..23: note = source = /note="Description of Artificial Sequence: Syntheticoligonucleotide"
  source 1..23: mol_type = other RNA
gatcgagcgtcccgtgggcgggt

SEQ ID NO: 410 - RNA, 28 nt, synthetic construct
  misc_feature 1..28: note = source = /note="Description of Artificial Sequence: Syntheticoligonucleotide"
  source 1..28: mol_type = other RNA
tgacgtcaaagtcacgtggggagggcgg

SEQ ID NO: 411 - RNA, 23 nt, synthetic construct
  misc_feature 1..23: note = source = /note="Description of Artificial Sequence: Syntheticoligonucleotide"
  source 1..23: mol_type = other RNA
gatcgagcgtcccgtgggcgggt

SEQ ID NO: 412 - RNA, 23 nt, synthetic construct
  misc_feature 1..23: note = source = /note="Description of Artificial Sequence: Syntheticoligonucleotide"
  source 1..23: mol_type = other RNA
gatcgagcgtcccgtgggcgggt

SEQ ID NO: 413 - RNA, 28 nt, synthetic construct
  misc_feature 1..28: note = source = /note="Description of Artificial Sequence: Syntheticoligonucleotide"
  source 1..28: mol_type = other RNA
tgacgtcaaagtcacgtggggagggcgg

SEQ ID NO: 414 - RNA, 26 nt, synthetic construct
  misc_feature 1..26: note = source = /note="Description of Artificial Sequence: Syntheticoligonucleotide"
  source 1..26: mol_type = other RNA
acgtggtaagtcacgtgggggcagct

SEQ ID NO: 415 - RNA, 25 nt, synthetic construct
  misc_feature 1..25: note = source = /note="Description of Artificial Sequence: Syntheticoligonucleotide"
  source 1..25: mol_type = other RNA
attttataatacgcgcgtcccctcc

SEQ ID NO: 416 - RNA, 22 nt, synthetic construct
  misc_feature 1..22: note = source = /note="Description of Artificial Sequence: Syntheticoligonucleotide"
  source 1..22: mol_type = other RNA
aagggacagccttccggcttgc

SEQ ID NO: 417 - RNA, 25 nt, synthetic construct
  misc_feature 1..25: note = source = /note="Description of Artificial Sequence: Syntheticoligonucleotide"
  source 1..25: mol_type = other RNA
cataagtcacgtggggacggctgct

SEQ ID NO: 418 - RNA, 24 nt, synthetic construct
  misc_feature 1..24: note = source = /note="Description of Artificial Sequence: Syntheticoligonucleotide"
  source 1..24: mol_type = other RNA
taaggcggaacaggctgacacccc

SEQ ID NO: 419 - RNA, 28 nt, synthetic construct
  misc_feature 1..28: note = source = /note="Description of Artificial Sequence: Syntheticoligonucleotide"
  source 1..28: mol_type = other RNA
tacgtcataagtcacgtgggaagagctg

SEQ ID NO: 420 - RNA, 22 nt, synthetic construct
  misc_feature 1..22: note = source = /note="Description of Artificial Sequence: Syntheticoligonucleotide"
  source 1..22: mol_type = other RNA
tcgggcgtcccgagggcgggtg

SEQ ID NO: 421 - RNA, 25 nt, synthetic construct
  misc_feature 1..25: note = source = /note="Description of Artificial Sequence: Syntheticoligonucleotide"
  source 1..25: mol_type = other RNA
aaagtgagtggggccagacttcgcc

SEQ ID NO: 422 - RNA, 22 nt, synthetic construct
  misc_feature 1..22: note = source = /note="Description of Artificial Sequence: Syntheticoligonucleotide"
  source 1..22: mol_type = other RNA
ctctcacgtgatgggggcgtgc

SEQ ID NO: 423 - RNA, 28 nt, synthetic construct
  misc_feature 1..28: note = source = /note="Description of Artificial Sequence: Syntheticoligonucleotide"
  source 1..28: mol_type = other RNA
tctactacgtacacttcctggggtgtgt

SEQ ID NO: 424 - RNA, 22 nt, synthetic construct
  misc_feature 1..22: note = source = /note="Description of Artificial Sequence: Syntheticoligonucleotide"
  source 1..22: mol_type = other RNA
tggctgttgtcacgtgacttga

SEQ ID NO: 425 - RNA, 24 nt, synthetic construct
  misc_feature 1..24: note = source = /note="Description of Artificial Sequence: Syntheticoligonucleotide"
  source 1..24: mol_type = other RNA
agacgccattttaggccctcgcgg

SEQ ID NO: 426 - RNA, 25 nt, synthetic construct
  misc_feature 1..25: note = source = /note="Description of Artificial Sequence: Syntheticoligonucleotide"
  source 1..25: mol_type = other RNA
tgtcgtgacgtttgagacacgtgat

SEQ ID NO: 427 - RNA, 30 nt, synthetic construct
  misc_feature 1..30: note = source = /note="Description of Artificial Sequence: Syntheticoligonucleotide"
  source 1..30: mol_type = other RNA
tgacgtttgagacacgtgatgggggcgtgc

SEQ ID NO: 428 - RNA, 22 nt, synthetic construct
  misc_feature 1..22: note = source = /note="Description of Artificial Sequence: Syntheticoligonucleotide"
  source 1..22: mol_type = other RNA
agtgagtggggccagacttcgc

SEQ ID NO: 429 - RNA, 30 nt, synthetic construct
  misc_feature 1..30: note = source = /note="Description of Artificial Sequence: Syntheticoligonucleotide"
  source 1..30: mol_type = other RNA
tgtgacgtcaaagtcacgtggggagggcgg

SEQ ID NO: 430 - RNA, 27 nt, synthetic construct
  misc_feature 1..27: note = source = /note="Description of Artificial Sequence: Syntheticoligonucleotide"
  source 1..27: mol_type = other RNA
aaaagaggaagtatgacgtagcggcgg

SEQ ID NO: 431 - RNA, 21 nt, synthetic construct
  misc_feature 1..21: note = source = /note="Description of Artificial Sequence: Syntheticoligonucleotide"
  source 1..21: mol_type = other RNA
agcgagcggccgagcgacccg

SEQ ID NO: 432 - RNA, 24 nt, synthetic construct
  misc_feature 1..24: note = source = /note="Description of Artificial Sequence: Syntheticoligonucleotide"
  source 1..24: mol_type = other RNA
ttcagtcacgtggggagggaacgc

SEQ ID NO: 433 - RNA, 24 nt, synthetic construct
  misc_feature 1..24: note = source = /note="Description of Artificial Sequence: Syntheticoligonucleotide"
  source 1..24: mol_type = other RNA
aaaagaggaagtgtgacgtagcgg

SEQ ID NO: 434 - RNA, 30 nt, synthetic construct; identical to SEQ ID NO: 429
  misc_feature 1..30: note = source = /note="Description of Artificial Sequence: Syntheticoligonucleotide"
  source 1..30: mol_type = other RNA

SEQ ID NO: 435 - RNA, 24 nt, synthetic construct
  misc_feature 1..24: note = source = /note="Description of Artificial Sequence: Syntheticoligonucleotide"
  source 1..24: mol_type = other RNA
aaaagaggaagtatgacgtggcgg

SEQ ID NO: 436 - RNA, 28 nt, synthetic construct
  misc_feature 1..28: note = source = /note="Description of Artificial Sequence: Syntheticoligonucleotide"
  source 1..28: mol_type = other RNA
tgacgtcaaagtcacgtggggagggcgg

SEQ ID NO: 437 - RNA, 29 nt, synthetic construct
  misc_feature 1..29: note = source = /note="Description of Artificial Sequence: Syntheticoligonucleotide"
  source 1..29: mol_type = other RNA
aaaaaagaggaagtgtgacgtagcggcgg

SEQ ID NO: 438 - RNA, 23 nt, synthetic construct
  misc_feature 1..23: note = source = /note="Description of Artificial Sequence: Syntheticoligonucleotide"
  source 1..23: mol_type = other RNA
gatcgagcgtcccgtgggcgggt

SEQ ID NO: 439 - RNA, 30 nt, synthetic construct
  misc_feature 1..30: note = source = /note="Description of Artificial Sequence: Syntheticoligonucleotide"
  source 1..30: mol_type = other RNA
tgtgacgtcaaagtcacgtggggaggaggg

SEQ ID NO: 440 - RNA, 21 nt, synthetic construct
  misc_feature 1..21: note = source = /note="Description of Artificial Sequence: Syntheticoligonucleotide"
  source 1..21: mol_type = other RNA
ttggtcctgacgtcactgtca

SEQ ID NO: 441 - RNA, 27 nt, synthetic construct
  misc_feature 1..27: note = source = /note="Description of Artificial Sequence: Syntheticoligonucleotide"
  source 1..27: mol_type = other RNA
cgtcactgtcacgtggggagggaacac

SEQ ID NO: 442 - RNA, 24 nt, synthetic construct
  misc_feature 1..24: note = source = /note="Description of Artificial Sequence: Syntheticoligonucleotide"
  source 1..24: mol_type = other RNA
taagtaagcatggcgggcggtgat

SEQ ID NO: 443 - RNA, 22 nt, synthetic construct
  misc_feature 1..22: note = source = /note="Description of Artificial Sequence: Syntheticoligonucleotide"
  source 1..22: mol_type = other RNA
aagtaagcatggcgggcggtga

SEQ ID NO: 444 - RNA, 24 nt, synthetic construct
  misc_feature 1..24: note = source = /note="Description of Artificial Sequence: Syntheticoligonucleotide"
  source 1..24: mol_type = other RNA
taagtagttgaggcggacggtggc

SEQ ID NO: 445 - RNA, 29 nt, synthetic construct
  misc_feature 1..29: note = source = /note="Description of Artificial Sequence: Syntheticoligonucleotide"
  source 1..29: mol_type = other RNA
tcatgcttgcacaaaatggcggacttccg

SEQ ID NO: 446 - RNA, 23 nt, synthetic construct
  misc_feature 1..23: note = source = /note="Description of Artificial Sequence: Syntheticoligonucleotide"
  source 1..23: mol_type = other RNA
agtagctgacgtcaaggattgac

SEQ ID NO: 447 - RNA, 23 nt, synthetic construct
  misc_feature 1..23: note = source = /note="Description of Artificial Sequence: Syntheticoligonucleotide"
  source 1..23: mol_type = other RNA
agtagctgacgtcaaggattgac

SEQ ID NO: 448 - RNA, 23 nt, synthetic construct
  misc_feature 1..23: note = source = /note="Description of Artificial Sequence: Syntheticoligonucleotide"
  source 1..23: mol_type = other RNA
acaagtcacgtgggggggacccg

SEQ ID NO: 449 - RNA, 25 nt, synthetic construct
  misc_feature 1..25: note = source = /note="Description of Artificial Sequence: Syntheticoligonucleotide"
  source 1..25: mol_type = other RNA
aagtagctgacgtcaaggattgacg

SEQ ID NO: 450 - RNA, 23 nt, synthetic construct
  misc_feature 1..23: note = source = /note="Description of Artificial Sequence: Syntheticoligonucleotide"
  source 1..23: mol_type = other RNA
ataagtcacgtggtggggacccg

SEQ ID NO: 451 - RNA, 26 nt, synthetic construct
  misc_feature 1..26: note = source = /note="Description of Artificial Sequence: Syntheticoligonucleotide"
  source 1..26: mol_type = other RNA
aagtcagctctggggaggcgtgactt

SEQ ID NO: 452 - RNA, 23 nt, synthetic construct
  misc_feature 1..23: note = source = /note="Description of Artificial Sequence: Syntheticoligonucleotide"
  source 1..23: mol_type = other RNA
agtagctgacgtcaaggattgac

SEQ ID NO: 453 - RNA, 22 nt, synthetic construct
  misc_feature 1..22: note = source = /note="Description of Artificial Sequence: Syntheticoligonucleotide"
  source 1..22: mol_type = other RNA
caagtcacgtggaggggacacg

SEQ ID NO: 454 - RNA, 27 nt, synthetic construct
  misc_feature 1..27: note = source = /note="Description of Artificial Sequence: Syntheticoligonucleotide"
  source 1..27: mol_type = other RNA
tgttaagtggctgtcgccgaggattga

SEQ ID NO: 455 - RNA, 22 nt, synthetic construct
  misc_feature 1..22: note = source = /note="Description of Artificial Sequence: Syntheticoligonucleotide"
  source 1..22: mol_type = other RNA
taagtcacatgacaggggtcca

SEQ ID NO: 456 - RNA, 22 nt, synthetic construct
  misc_feature 1..22: note = source = /note="Description of Artificial Sequence: Syntheticoligonucleotide"
  source 1..22: mol_type = other RNA
cggagagggagccacggaggtg

SEQ ID NO: 457 - RNA, 23 nt, synthetic construct
  misc_feature 1..23: note = source = /note="Description of Artificial Sequence: Syntheticoligonucleotide"
  source 1..23: mol_type = other RNA
aagtcagcgctggggaggcatga

SEQ ID NO: 458 - RNA, 28 nt, synthetic construct
  misc_feature 1..28: note = source = /note="Description of Artificial Sequence: Syntheticoligonucleotide"
  source 1..28: mol_type = other RNA
tcttaagtggctgtcgccgaggattgac

SEQ ID NO: 459 - RNA, 24 nt, synthetic construct
  misc_feature 1..24: note = source = /note="Description of Artificial Sequence: Syntheticoligonucleotide"
  source 1..24: mol_type = other RNA
aagtcacatgtctaggggtccact

SEQ ID NO: 460 - RNA, 23 nt, synthetic construct
  misc_feature 1..23: note = source = /note="Description of Artificial Sequence: Syntheticoligonucleotide"
  source 1..23: mol_type = other RNA
aagtaaggcggaagcagctgtcc

SEQ ID NO: 461 - RNA, 29 nt, synthetic construct
  misc_feature 1..29: note = source = /note="Description of Artificial Sequence: Syntheticoligonucleotide"
  source 1..29: mol_type = other RNA
atcttaagtggctgtcgctgaggattgac

SEQ ID NO: 462 - RNA, 24 nt, synthetic construct
  misc_feature 1..24: note = source = /note="Description of Artificial Sequence: Syntheticoligonucleotide"
  source 1..24: mol_type = other RNA
taagtcacatgacaggagtccact

SEQ ID NO: 463 - RNA, 22 nt, synthetic construct
  misc_feature 1..22: note = source = /note="Description of Artificial Sequence: Syntheticoligonucleotide"
  source 1..22: mol_type = other RNA
aagtggctgtcgccgaggattg

SEQ ID NO: 464 - RNA, 22 nt, synthetic construct
  misc_feature 1..22: note = source = /note="Description of Artificial Sequence: Syntheticoligonucleotide"
  source 1..22: mol_type = other RNA
taagtcacatgacaggggtcca

SEQ ID NO: 465 - RNA, 23 nt, synthetic construct
  misc_feature 1..23: note = source = /note="Description of Artificial Sequence: Syntheticoligonucleotide"
  source 1..23: mol_type = other RNA
acaagtcacgtgggggggacccg

SEQ ID NO: 466 - RNA, 28 nt, synthetic construct
  misc_feature 1..28: note = source = /note="Description of Artificial Sequence: Syntheticoligonucleotide"
  source 1..28: mol_type = other RNA
attttaggctgttgccgggcgtttgact

SEQ ID NO: 467 - RNA, 23 nt, synthetic construct
  misc_feature 1..23: note = source = /note="Description of Artificial Sequence: Syntheticoligonucleotide"
  source 1..23: mol_type = other RNA
ataagtcacgtgacagggagggg

SEQ ID NO: 468 - RNA, 21 nt, synthetic construct
  misc_feature 1..21: note = source = /note="Description of Artificial Sequence: Syntheticoligonucleotide"
  source 1..21: mol_type = other RNA
aagtaggtgacgtccaggact

SEQ ID NO: 469 - RNA, 24 nt, synthetic construct
  misc_feature 1..24: note = source = /note="Description of Artificial Sequence: Syntheticoligonucleotide"
  source 1..24: mol_type = other RNA
cataagtcacgtggggacggctgt

SEQ ID NO: 470 - RNA, 26 nt, synthetic construct
  misc_feature 1..26: note = source = /note="Description of Artificial Sequence: Syntheticoligonucleotide"
  source 1..26: mol_type = other RNA
taagtaaggcggaagagctctagcta

SEQ ID NO: 471 - RNA, 23 nt, synthetic construct
  misc_feature 1..23: note = source = /note="Description of Artificial Sequence: Syntheticoligonucleotide"
  source 1..23: mol_type = other RNA
agtagctgacgtcaaggattgac

SEQ ID NO: 472 - RNA, 23 nt, synthetic construct
  misc_feature 1..23: note = source = /note="Description of Artificial Sequence: Syntheticoligonucleotide"
  source 1..23: mol_type = other RNA
acaagtcacgtgggggggacccg

SEQ ID NO: 473 - RNA, 24 nt, synthetic construct
  misc_feature 1..24: note = source = /note="Description of Artificial Sequence: Syntheticoligonucleotide"
  source 1..24: mol_type = other RNA
taagtaagcatggcgggcggcgac

SEQ ID NO: 474 - RNA, 25 nt, synthetic construct
  misc_feature 1..25: note = source = /note="Description of Artificial Sequence: Syntheticoligonucleotide"
  source 1..25: mol_type = other RNA
atcgagacacgtggtgccagcagct

SEQ ID NO: 475 - RNA, 30 nt, synthetic construct
  misc_feature 1..30: note = source = /note="Description of Artificial Sequence: Syntheticoligonucleotide"
  source 1..30: mol_type = other RNA
tcatcctcagccggaacttacacaaaatgg

SEQ ID NO: 476 - RNA, 26 nt, synthetic construct
  misc_feature 1..26: note = source = /note="Description of Artificial Sequence: Syntheticoligonucleotide"
  source 1..26: mol_type = other RNA
atatgtcacgtggggaggccctgctg

SEQ ID NO: 477 - RNA, 26 nt, synthetic construct
  misc_feature 1..26: note = source = /note="Description of Artificial Sequence: Syntheticoligonucleotide"
  source 1..26: mol_type = other RNA
aagtaaggcggaagcagctccacttt

SEQ ID NO: 478 - RNA, 24 nt, synthetic construct
  misc_feature 1..24: note = source = /note="Description of Artificial Sequence: Syntheticoligonucleotide"
  source 1..24: mol_type = other RNA
aagtaaggcggaagtttctccact

SEQ ID NO: 479 - RNA, 24 nt, synthetic construct
  misc_feature 1..24: note = source = /note="Description of Artificial Sequence: Syntheticoligonucleotide"
  source 1..24: mol_type = other RNA
taagtagttgaggcggacggtggc

SEQ ID NO: 480 - RNA, 23 nt, synthetic construct
  misc_feature 1..23: note = source = /note="Description of Artificial Sequence: Syntheticoligonucleotide"
  source 1..23: mol_type = other RNA
taagtagttgaggcggacggtgg

SEQ ID NO: 481 - RNA, 27 nt, synthetic construct
  misc_feature 1..27: note = source = /note="Description of Artificial Sequence: Syntheticoligonucleotide"
  source 1..27: mol_type = other RNA
gaccttcggcgtcgggggggtcggggg

SEQ ID NO: 482 - RNA, 19 nt, synthetic construct
  misc_feature 1..19: note = source = /note="Description of Artificial Sequence: Syntheticoligonucleotide"
  source 1..19: mol_type = other RNA
atcctcggcggaacctata

SEQ ID NO: 483 - RNA, 26 nt, synthetic construct
  misc_feature 1..26: note = source = /note="Description of Artificial Sequence: Syntheticoligonucleotide"
  source 1..26: mol_type = other RNA
atcgatgacgtggggaggcgtactat

SEQ ID NO: 484 - RNA, 24 nt, synthetic construct
  misc_feature 1..24: note = source = /note="Description of Artificial Sequence: Syntheticoligonucleotide"
  source 1..24: mol_type = other RNA
tggcggaggagcacttccggcttg

SEQ ID NO: 485 - RNA, 25 nt, synthetic construct
  misc_feature 1..25: note = source = /note="Description of Artificial Sequence: Syntheticoligonucleotide"
  source 1..25: mol_type = other RNA
aacaagtcacgtggggagggttggc

SEQ ID NO: 486 - RNA, 21 nt, synthetic construct
  misc_feature 1..21: note = source = /note="Description of Artificial Sequence: Syntheticoligonucleotide"
  source 1..21: mol_type = other RNA
aggggtcagccttccgcttta

SEQ ID NO: 487 - RNA, 21 nt, synthetic construct
  misc_feature 1..21: note = source = /note="Description of Artificial Sequence: Syntheticoligonucleotide"
  source 1..21: mol_type = other RNA
aggggtcagccttccgcttta

SEQ ID NO: 488 - RNA, 24 nt, synthetic construct
  misc_feature 1..24: note = source = /note="Description of Artificial Sequence: Syntheticoligonucleotide"
  source 1..24: mol_type = other RNA
taagtcagcttcggggagggtcac

SEQ ID NO: 489 - RNA, 27 nt, synthetic construct
  misc_feature 1..27: note = source = /note="Description of Artificial Sequence: Syntheticoligonucleotide"
  source 1..27: mol_type = other RNA
tcataagtgacgtagctggtgtctgct

SEQ ID NO: 490 - RNA, 23 nt, synthetic construct
  misc_feature 1..23: note = source = /note="Description of Artificial Sequence: Syntheticoligonucleotide"
  source 1..23: mol_type = other RNA
catcctcggcggaagctacacaa

SEQ ID NO: 491 - RNA, 23 nt, synthetic construct
  misc_feature 1..23: note = source = /note="Description of Artificial Sequence: Syntheticoligonucleotide"
  source 1..23: mol_type = other RNA
ggccccgtcacgtgacttaccac

SEQ ID NO: 492 - RNA, 24 nt, synthetic construct
  misc_feature 1..24: note = source = /note="Description of Artificial Sequence: Syntheticoligonucleotide"
  source 1..24: mol_type = other RNA
tcatcctcggcggaagctacacaa

SEQ ID NO: 493 - RNA, 23 nt, synthetic construct
  misc_feature 1..23: note = source = /note="Description of Artificial Sequence: Syntheticoligonucleotide"
  source 1..23: mol_type = other RNA
ggccccgtcacgtgatttgtcac

SEQ ID NO: 494 - RNA, 27 nt, synthetic construct
  misc_feature 1..27: note = source = /note="Description of Artificial Sequence: Syntheticoligonucleotide"
  source 1..27: mol_type = other RNA
ccgggtcataggtcacacctacgtcac

SEQ ID NO: 495 - RNA, 28 nt, synthetic construct
  misc_feature 1..28: note = source = /note="Description of Artificial Sequence: Syntheticoligonucleotide"
  source 1..28: mol_type = other RNA
ggctgccgccccccccggggaaaggggg

SEQ ID NO: 496 - RNA, 22 nt, synthetic construct
  misc_feature 1..22: note = source = /note="Description of Artificial Sequence: Syntheticoligonucleotide"
  source 1..22: mol_type = other RNA
atcctcgtccacgtgactgtga

SEQ ID NO: 497 - RNA, 21 nt, synthetic construct
  misc_feature 1..21: note = source = /note="Description of Artificial Sequence: Syntheticoligonucleotide"
  source 1..21: mol_type = other RNA
gagcacttccggcttgcccaa

SEQ ID NO: 498 - RNA, 20 nt, synthetic construct
  misc_feature 1..20: note = source = /note="Description of Artificial Sequence: Syntheticoligonucleotide"
  source 1..20: mol_type = other RNA
caatcctcttacgtggcctg

SEQ ID NO: 499 - RNA, 24 nt, synthetic construct
  misc_feature 1..24: note = source = /note="Description of Artificial Sequence: Syntheticoligonucleotide"
  source 1..24: mol_type = other RNA
cgaggttaagggccaattcgggct

SEQ ID NO: 500 - RNA, 23 nt, synthetic construct
  misc_feature 1..23: note = source = /note="Description of Artificial Sequence: Syntheticoligonucleotide"
  source 1..23: mol_type = other RNA
gggcccccgcggggctctcggcg

SEQ ID NO: 501 - RNA, 27 nt, synthetic construct
  misc_feature 1..27: note = source = /note="Description of Artificial Sequence: Syntheticoligonucleotide"
  source 1..27: mol_type = other RNA
gcggggcgtggccgtatcagaaaatgg

SEQ ID NO: 502 - RNA, 19 nt, synthetic construct
  misc_feature 1..19: note = source = /note="Description of Artificial Sequence: Syntheticoligonucleotide"
  source 1..19: mol_type = other RNA
cctcggtcacgtggcctgt

SEQ ID NO: 503 - RNA, 26 nt, synthetic construct
  misc_feature 1..26: note = source = /note="Description of Artificial Sequence: Syntheticoligonucleotide"
  source 1..26: mol_type = other RNA
cctcgtcacgtgacctgacgtcacag

SEQ ID NO: 504 - RNA, 25 nt, synthetic construct
  misc_feature 1..25: note = source = /note="Description of Artificial Sequence: Syntheticoligonucleotide"
  source 1..25: mol_type = other RNA
ccgtccgcggcgagagcgcgagcga

SEQ ID NO: 505 - RNA, 27 nt, synthetic construct
  misc_feature 1..27: note = source = /note="Description of Artificial Sequence: Syntheticoligonucleotide"
  source 1..27: mol_type = other RNA
atcctcgtcacgtgacctgacgtcacg

SEQ ID NO: 506 - RNA, 25 nt, synthetic construct
  misc_feature 1..25: note = source = /note="Description of Artificial Sequence: Syntheticoligonucleotide"
  source 1..25: mol_type = other RNA
ccgtccgcggcgagagcgcgagcga

SEQ ID NO: 507 - RNA, 25 nt, synthetic construct
  misc_feature 1..25: note = source = /note="Description of Artificial Sequence: Syntheticoligonucleotide"
  source 1..25: mol_type = other RNA
ccgtccgcggcgagagcgcgagcga

SEQ ID NO: 508 - RNA, 27 nt, synthetic construct
  misc_feature 1..27: note = source = /note="Description of Artificial Sequence: Syntheticoligonucleotide"
  source 1..27: mol_type = other RNA
atcctcgtcacgtgacctgacgtcacg

SEQ ID NO: 509 - RNA, 25 nt, synthetic construct
  misc_feature 1..25: note = source = /note="Description of Artificial Sequence: Syntheticoligonucleotide"
  source 1..25: mol_type = other RNA
ctgacccgcgtgactggtcacgtga

SEQ ID NO: 510 - RNA, 26 nt, synthetic construct
  misc_feature 1..26: note = source = /note="Description of Artificial Sequence: Syntheticoligonucleotide"
  source 1..26: mol_type = other RNA
cggggcgtggccgtattagaaaatgg

SEQ ID NO: 511 - RNA, 29 nt, synthetic construct
  misc_feature 1..29: note = source = /note="Description of Artificial Sequence: Syntheticoligonucleotide"
  source 1..29: mol_type = other RNA
agtaaggcggaaccaggctgtcaccctgt

SEQ ID NO: 512 - RNA, 24 nt, synthetic construct
  misc_feature 1..24: note = source = /note="Description of Artificial Sequence: Syntheticoligonucleotide"
  source 1..24: mol_type = other RNA
tagctgacccgcgtgacttgtcac

SEQ ID NO: 513 - RNA, 19 nt, synthetic construct
  misc_feature 1..19: note = source = /note="Description of Artificial Sequence: Syntheticoligonucleotide"
  source 1..19: mol_type = other RNA
ggtcagcctccgctttgca

SEQ ID NO: 514 - RNA, 28 nt, synthetic construct
  misc_feature 1..28: note = source = /note="Description of Artificial Sequence: Syntheticoligonucleotide"
  source 1..28: mol_type = other RNA
gctgacccgcgtggcttgtcacgtgagt

SEQ ID NO: 515 - RNA, 25 nt, synthetic construct
  misc_feature 1..25: note = source = /note="Description of Artificial Sequence: Syntheticoligonucleotide"
  source 1..25: mol_type = other RNA
ggcccgtccgcggcgagagcgcgag

SEQ ID NO: 516 - RNA, 27 nt, synthetic construct
  misc_feature 1..27: note = source = /note="Description of Artificial Sequence: Syntheticoligonucleotide"
  source 1..27: mol_type = other RNA
tccgggtgcgtctgggggccgccattt

SEQ ID NO: 517 - RNA, 21 nt, synthetic construct
  misc_feature 1..21: note = source = /note="Description of Artificial Sequence: Syntheticoligonucleotide"
  source 1..21: mol_type = other RNA
atcctcgaccacgtgactgtg

SEQ ID NO: 518 - RNA, 30 nt, synthetic construct
  misc_feature 1..30: note = source = /note="Description of Artificial Sequence: Syntheticoligonucleotide"
  source 1..30: mol_type = other RNA
ataaaccagaggggtgacgaatggtagagt

SEQ ID NO: 519 - RNA, 23 nt, synthetic construct
  misc_feature 1..23: note = source = /note="Description of Artificial Sequence: Syntheticoligonucleotide"
  source 1..23: mol_type = other RNA
caaagtcacgtggtgacggccat

SEQ ID NO: 520 - RNA, 26 nt, synthetic construct
  misc_feature 1..26: note = source = /note="Description of Artificial Sequence: Syntheticoligonucleotide"
  source 1..26: mol_type = other RNA
gtaggcgcgttttaatgacgtcacgg

SEQ ID NO: 521 - RNA, 28 nt, synthetic construct
  misc_feature 1..28: note = source = /note="Description of Artificial Sequence: Syntheticoligonucleotide"
  source 1..28: mol_type = other RNA
taggcgcgttttaatgacgtcacggcag

SEQ ID NO: 522 - RNA, 29 nt, synthetic construct
  misc_feature 1..29: note = source = /note="Description of Artificial Sequence: Syntheticoligonucleotide"
  source 1..29: mol_type = other RNA
atccctggtcacgtgactctgacgtcacg

SEQ ID NO: 523 - RNA, 26 nt, synthetic construct
  misc_feature 1..26: note = source = /note="Description of Artificial Sequence: Syntheticoligonucleotide"
  source 1..26: mol_type = other RNA
gcgtgtgggggccgccattttagctt

SEQ ID NO: 524 - RNA, 29 nt, synthetic construct
  misc_feature 1..29: note = source = /note="Description of Artificial Sequence: Syntheticoligonucleotide"
  source 1..29: mol_type = other RNA
tcatcctcgtcacgtgacctgacgtcacg

SEQ ID NO: 525 - RNA, 29 nt, synthetic construct
  misc_feature 1..29: note = source = /note="Description of Artificial Sequence: Syntheticoligonucleotide"
  source 1..29: mol_type = other RNA
cgccatcttgtgacttccttccgcttttt

SEQ ID NO: 526 - RNA, 22 nt, synthetic construct
  misc_feature 1..22: note = source = /note="Description of Artificial Sequence: Syntheticoligonucleotide"
  source 1..22: mol_type = other RNA
tagagttttttccgcccgtccg

SEQ ID NO: 527 - RNA, 23 nt, synthetic construct
  misc_feature 1..23: note = source = /note="Description of Artificial Sequence: Syntheticoligonucleotide"
  source 1..23: mol_type = other RNA
gtccctggtcacgtgattgtgac

SEQ ID NO: 528 - RNA, 26 nt, synthetic construct
  misc_feature 1..26: note = source = /note="Description of Artificial Sequence: Syntheticoligonucleotide"
  source 1..26: mol_type = other RNA
cattttgtgacttccttccgcttttt

SEQ ID NO: 529 - RNA, 29 nt, synthetic construct
  misc_feature 1..29: note = source = /note="Description of Artificial Sequence: Syntheticoligonucleotide"
  source 1..29: mol_type = other RNA
tcatcctcgtcacgtgacctgacgtcacg

SEQ ID NO: 530 - RNA, 30 nt, synthetic construct
  misc_feature 1..30: note = source = /note="Description of Artificial Sequence: Syntheticoligonucleotide"
  source 1..30: mol_type = other RNA
ccgccatcttgtgacttccttccgcttttt

SEQ ID NO: 531 - RNA, 27 nt, synthetic construct
  misc_feature 1..27: note = source = /note="Description of Artificial Sequence: Syntheticoligonucleotide"
  source 1..27: mol_type = other RNA
atcctcgtcacgtgacctgacgtcacg

SEQ ID NO: 532 - RNA, 30 nt, synthetic construct
  misc_feature 1..30: note = source = /note="Description of Artificial Sequence: Syntheticoligonucleotide"
  source 1..30: mol_type = other RNA
cgccatcttgtgacttccttccgctttttc

SEQ ID NO: 533 - RNA, 25 nt, synthetic construct
  misc_feature 1..25: note = source = /note="Description of Artificial Sequence: Syntheticoligonucleotide"
  source 1..25: mol_type = other RNA
ccgtccgcggcgagagcgcgagcga

SEQ ID NO: 534 - RNA, 29 nt, synthetic construct
  misc_feature 1..29: note = source = /note="Description of Artificial Sequence: Syntheticoligonucleotide"
  source 1..29: mol_type = other RNA
tcatcctcgtcacgtgacctgacgtcacg

SEQ ID NO: 535 - RNA, 23 nt, synthetic construct
  misc_feature 1..23: note = source = /note="Description of Artificial Sequence: Syntheticoligonucleotide"
  source 1..23: mol_type = other RNA
cttagtgacgtcacggcagccat

SEQ ID NO: 536 - RNA, 25 nt, synthetic construct
  misc_feature 1..25: note = source = /note="Description of Artificial Sequence: Syntheticoligonucleotide"
  source 1..25: mol_type = other RNA
gtccctggtcacgtgacatgacgtc

SEQ ID NO: 537 - RNA, 24 nt, synthetic construct
  misc_feature 1..24: note = source = /note="Description of Artificial Sequence: Syntheticoligonucleotide"
  source 1..24: mol_type = other RNA
cacagccggtcatgcttgcacaaa

SEQ ID NO: 538 - RNA, 22 nt, synthetic construct
  misc_feature 1..22: note = source = /note="Description of Artificial Sequence: Syntheticoligonucleotide"
  source 1..22: mol_type = other RNA
acagcctgtcatgcttgcacaa

SEQ ID NO: 539 - RNA, 24 nt, synthetic construct
  misc_feature 1..24: note = source = /note="Description of Artificial Sequence: Syntheticoligonucleotide"
  source 1..24: mol_type = other RNA
caccatcagccacacctactcaaa

SEQ ID NO: 540 - RNA, 28 nt, synthetic construct
  misc_feature 1..28: note = source = /note="Description of Artificial Sequence: Syntheticoligonucleotide"
  source 1..28: mol_type = other RNA
cgggtcgccgccatatttggtcacgtga

SEQ ID NO: 541 - RNA, 23 nt, synthetic construct
  misc_feature 1..23: note = source = /note="Description of Artificial Sequence: Syntheticoligonucleotide"
  source 1..23: mol_type = other RNA
catcctcggcggaagctacacaa

SEQ ID NO: 542 - RNA, 23 nt, synthetic construct
  misc_feature 1..23: note = source = /note="Description of Artificial Sequence: Syntheticoligonucleotide"
  source 1..23: mol_type = other RNA
catcctcggcggaagctacacaa

SEQ ID NO: 543 - RNA, 23 nt, synthetic construct
  misc_feature 1..23: note = source = /note="Description of Artificial Sequence: Syntheticoligonucleotide"
  source 1..23: mol_type = other RNA
ggccccgtcacgtgacttaccac

SEQ ID NO: 544 - RNA, 24 nt, synthetic construct
  misc_feature 1..24: note = source = /note="Description of Artificial Sequence: Syntheticoligonucleotide"
  source 1..24: mol_type = other RNA
tcatcctcggcggaagctacacaa

SEQ ID NO: 545 - RNA, 23 nt, synthetic construct
  misc_feature 1..23: note = source = /note="Description of Artificial Sequence: Syntheticoligonucleotide"
  source 1..23: mol_type = other RNA
ggccccgtcacgtgatttgtcac

SEQ ID NO: 546 - RNA, 25 nt, synthetic construct
  misc_feature 1..25: note = source = /note="Description of Artificial Sequence: Syntheticoligonucleotide"
  source 1..25: mol_type = other RNA
gtcatcctcaccataactggcacaa

SEQ ID NO: 547 - RNA, 23 nt, synthetic construct
  misc_feature 1..23: note = source = /note="Description of Artificial Sequence: Syntheticoligonucleotide"
  source 1..23: mol_type = other RNA
catcctcggcggaagctacacaa

SEQ ID NO: 548 - RNA, 23 nt, synthetic construct
  misc_feature 1..23: note = source = /note="Description of Artificial Sequence: Syntheticoligonucleotide"
  source 1..23: mol_type = other RNA
ggccccgtcacgtgacttaccac

SEQ ID NO: 549 - RNA, 25 nt, synthetic construct
  misc_feature 1..25: note = source = /note="Description of Artificial Sequence: Syntheticoligonucleotide"
  source 1..25: mol_type = other RNA
atcctcgacggtaaccgcaaacatg

SEQ ID NO: 550 - RNA, 21 nt, synthetic construct
  misc_feature 1..21: note = source = /note="Description of Artificial Sequence: Syntheticoligonucleotide"
  source 1..21: mol_type = other RNA
ggccccgacatgtgactcgtc

SEQ ID NO: 551 - RNA, 27 nt, synthetic construct
  misc_feature 1..27: note = source = /note="Description of Artificial Sequence: Syntheticoligonucleotide"
  source 1..27: mol_type = other RNA
agcacttccgaatggctgagttttcca

SEQ ID NO: 552 - RNA, 22 nt, synthetic construct
  misc_feature 1..22: note = source = /note="Description of Artificial Sequence: Syntheticoligonucleotide"
  source 1..22: mol_type = other RNA
atcctcaccggaactgacacaa

SEQ ID NO: 553 - RNA, 26 nt, synthetic construct
  misc_feature 1..26: note = source = /note="Description of Artificial Sequence: Syntheticoligonucleotide"
  source 1..26: mol_type = other RNA
catcctcggcggtaaccgcaaagatg

SEQ ID NO: 554 - RNA, 22 nt, synthetic construct
  misc_feature 1..22: note = source = /note="Description of Artificial Sequence: Syntheticoligonucleotide"
  source 1..22: mol_type = other RNA
taggccccgacatgtgactcgt

SEQ ID NO: 555 - RNA, 21 nt, synthetic construct
  misc_feature 1..21: note = source = /note="Description of Artificial Sequence: Syntheticoligonucleotide"
  source 1..21: mol_type = other RNA
acagccttccgctttgcacaa

SEQ ID NO: 556 - RNA, 27 nt, synthetic construct
  misc_feature 1..27: note = source = /note="Description of Artificial Sequence: Syntheticoligonucleotide"
  source 1..27: mol_type = other RNA
catcctcggcggtaaccgcaaagatgg

SEQ ID NO: 557 - RNA, 23 nt, synthetic construct
  misc_feature 1..23: note = source = /note="Description of Artificial Sequence: Syntheticoligonucleotide"
  source 1..23: mol_type = other RNA
taggccccgacatgtgactcgtc

SEQ ID NO: 558 - RNA, 20 nt, synthetic construct
  misc_feature 1..20: note = source = /note="Description of Artificial Sequence: Syntheticoligonucleotide"
  source 1..20: mol_type = other RNA
tcctcggcggtaaccgcaaa

SEQ ID NO: 559 - RNA, 21 nt, synthetic construct
  misc_feature 1..21: note = source = /note="Description of Artificial Sequence: Syntheticoligonucleotide"
  source 1..21: mol_type = other RNA
ggccccgacatgtgactcgtc

SEQ ID NO: 560 - RNA, 23 nt, synthetic construct
  misc_feature 1..23: note = source = /note="Description of Artificial Sequence: Syntheticoligonucleotide"
  source 1..23: mol_type = other RNA
ggccccgtcacgtgacttaccac

SEQ ID NO: 561 - RNA, 28 nt, synthetic construct
  misc_feature 1..28: note = source = /note="Description of Artificial Sequence: Syntheticoligonucleotide"
  source 1..28: mol_type = other RNA
tcaaacacccagcgacaccaaaaaatgg

SEQ ID NO: 562 - RNA, 22 nt, synthetic construct
  misc_feature 1..22: note = source = /note="Description of Artificial Sequence: Syntheticoligonucleotide"
  source 1..22: mol_type = other RNA
cctcgcccacgtgacttaccac

SEQ ID NO: 563 - RNA, 20 nt, synthetic construct
  misc_feature 1..20: note = source = /note="Description of Artificial Sequence: Syntheticoligonucleotide"
  source 1..20: mol_type = other RNA
cctcggcggaacctatacaa

SEQ ID NO: 564 - RNA, 22 nt, synthetic construct
  misc_feature 1..22: note = source = /note="Description of Artificial Sequence: Syntheticoligonucleotide"
  source 1..22: mol_type = other RNA
gccccgtcacgtgatttaccac

SEQ ID NO: 565 - RNA, 28 nt, synthetic construct
  misc_feature 1..28: note = source = /note="Description of Artificial Sequence: Syntheticoligonucleotide"
  source 1..28: mol_type = other RNA
gcggcggagcacttccgctttgcccaaa

SEQ ID NO: 566 - RNA, 23 nt, synthetic construct
  misc_feature 1..23: note = source = /note="Description of Artificial Sequence: Syntheticoligonucleotide"
  source 1..23: mol_type = other RNA
catcctcggcggaagctacacaa

SEQ ID NO: 567 - RNA, 23 nt, synthetic construct
  misc_feature 1..23: note = source = /note="Description of Artificial Sequence: Syntheticoligonucleotide"
  source 1..23: mol_type = other RNA
ggccccgtcacgtgacttaccac

SEQ ID NO: 568 - RNA, 25 nt, synthetic construct
  misc_feature 1..25: note = source = /note="Description of Artificial Sequence: Syntheticoligonucleotide"
  source 1..25: mol_type = other RNA
caccgcacttccgtgcttgcacaaa

SEQ ID NO: 569 - RNA, 24 nt, synthetic construct
  misc_feature 1..24: note = source = /note="Description of Artificial Sequence: Syntheticoligonucleotide"
  source 1..24: mol_type = other RNA
tcgctgacacacgtgtcttgtcac

SEQ ID NO: 570 - RNA, 30 nt, synthetic construct
  misc_feature 1..30: note = source = /note="Description of Artificial Sequence: Syntheticoligonucleotide"
  source 1..30: mol_type = other RNA
cattttaagtaagcaccgcctagggatgac

SEQ ID NO: 571 - RNA, 26 nt, synthetic construct
  misc_feature 1..26: note = source = /note="Description of Artificial Sequence: Syntheticoligonucleotide"
  source 1..26: mol_type = other RNA
gtaggccccgtcacgtgtcataccac

SEQ ID NO: 572 - RNA, 25 nt, synthetic construct
  misc_feature 1..25: note = source = /note="Description of Artificial Sequence: Syntheticoligonucleotide"
  source 1..25: mol_type = other RNA
ggcggggcacttccggcttgcccaa

SEQ ID NO: 573 - RNA, 26 nt, synthetic construct
  misc_feature 1..26: note = source = /note="Description of Artificial Sequence: Syntheticoligonucleotide"
  source 1..26: mol_type = other RNA
cggcggagcacttccggcttgcccaa

SEQ ID NO: 574 - RNA, 24 nt, synthetic construct
  misc_feature 1..24: note = source = /note="Description of Artificial Sequence: Syntheticoligonucleotide"
  source 1..24: mol_type = other RNA
caccatcagccacacctactcaaa

SEQ ID NO: 575 - RNA, 23 nt, synthetic construct
  misc_feature 1..23: note = source = /note="Description of Artificial Sequence: Syntheticoligonucleotide"
  source 1..23: mol_type = other RNA
accatcagccacacctactcaaa

SEQ ID NO: 576 - RNA, 28 nt, synthetic construct
  misc_feature 1..28: note = source = /note="Description of Artificial Sequence: Syntheticoligonucleotide"
  source 1..28: mol_type = other RNA
gactccgagatgccattggacactgagg

SEQ ID NO: 577 - RNA, 18 nt, synthetic construct
  misc_feature 1..18: note = source = /note="Description of Artificial Sequence: Syntheticoligonucleotide"
  source 1..18: mol_type = other RNA
agtaggtgccgtccagca

SEQ ID NO: 578 - RNA, 27 nt, synthetic construct
  misc_feature 1..27: note = source = /note="Description of Artificial Sequence: Syntheticoligonucleotide"
  source 1..27: mol_type = other RNA
aagtaggccccgctacgtcatcatcac

SEQ ID NO: 579 - RNA, 23 nt, synthetic construct
  misc_feature 1..23: note = source = /note="Description of Artificial Sequence: Syntheticoligonucleotide"
  source 1..23: mol_type = other RNA
aaggcggaagagctgctctatat

SEQ ID NO: 580 - RNA, 24 nt, synthetic construct
  misc_feature 1..24: note = source = /note="Description of Artificial Sequence: Syntheticoligonucleotide"
  source 1..24: mol_type = other RNA
caatcctcccacgtggcctgtcac

SEQ ID NO: 581 - RNA, 26 nt, synthetic construct
  misc_feature 1..26: note = source = /note="Description of Artificial Sequence: Syntheticoligonucleotide"
  source 1..26: mol_type = other RNA
aaggcggaaccaggctgtcaccccgt

SEQ ID NO: 582 - RNA, 26 nt, synthetic construct
  misc_feature 1..26: note = source = /note="Description of Artificial Sequence: Syntheticoligonucleotide"
  source 1..26: mol_type = other RNA
aaggcggaaccaggctgtcaccccgt

SEQ ID NO: 583 - RNA, 24 nt, synthetic construct
  misc_feature 1..24: note = source = /note="Description of Artificial Sequence: Syntheticoligonucleotide"
  source 1..24: mol_type = other RNA
catcctcaccggaactggtacaaa

SEQ ID NO: 584 - RNA, 26 nt, synthetic construct
  misc_feature 1..26: note = source = /note="Description of Artificial Sequence: Syntheticoligonucleotide"
  source 1..26: mol_type = other RNA
taggccccgccacgtcacttgtcacg

SEQ ID NO: 585 - DNA, 609 bp, Torque teno virus
  source 1..609: mol_type = other DNA
atggctgagttttccacgcccgtccgcagcggtgaagccacggagggagatcaccgcgtcccgagggcgggtgccgaaggtgagtttacacaccgaagtcaaggggcaattcgggctcgggactggccgggctatgggcaaggctctgaaaaaagcatgtttattggcaggcattacagaaagaaaagggcgctgtcactgtgtgctgtgcgaacaacaaagaaggcttgcaaactactaatagtaatgtggaccccacctcgcaatgatcaacagtaccttaactggcaatggtactcaagtgtacttagcccccacgctgctatgtgcgggtgtcccgacgctgtcgctcattttaatcatcttgcttctgtgcttcgtgccccgcaaaacccaccccctcccggtccccagcgaaacctgcccctccgacggctgccggctctcccggctgcgccagaggcgcccggagatagagcaccatggcctatggctggtggcgccgaaggagaagacggtggcgcaggtggagacccagaccatggaggccccgctggaggacccgaagacgcagacctgctagacgccgtggccaccgcagaaacgtaa

SEQ ID NO: 586 - DNA, 609 bp, Torque teno virus
  source 1..609: mol_type = other DNA
atggctgggttttccacgcccgtccgcagcggtgaagccacggagggagctcagcgcgtcccgagggcgggtgccgaaggtgagtttacacaccgcagtcaaggggcaattcgggctcgggactggccgggctatgggcaagactctgaaaaatgcatttttatcggcaggcattacagaaagaaaaaggcactgtcactgtgtgcagtgcgagcaacacagaaggcttgcaaacttctaaaagttatgtggagccctccccgcaacgatgaacattaccttaagggacaatggtactcaagtatacttagctctcactctgctttctgtggctgccccgatgctgtcgctcacttcaatcatcttgctactgtacttcgtgctccggaaaacccgggaccccccgggggacatcgaccttctccgctccgggtcctacccgctctcccggctgctcccgaggcgcccggtgatcgagcgccatggcctatgggttgtggaggagacggcgaaggaggtggaagaggtggagacgcagacggtggagacgccgctggaggacccgccgacgcagacctgctggacgccgtagacgccgcagaacagtaa

SEQ ID NO: 587 - DNA, 609 bp, Torque teno virus
  source 1..609: mol_type = other DNA
atggctgagttttccacgcccgtccgcagcggtgaagccacggagggagattaccgcgtcccgagggcgggtgccgaaggtgagtttacacaccgaagtcaaggggcaattcgggctcgggactggccgggctatgggcaaggctctgaaaaaagcatgtttattggcaggcattacagaaagaaaagggcgctgtcactgtgtgctgtgcgaacaacaaagaaggcttgcaaactactaatagtaatgtggaccccacctcgcaatgatcaacagtaccttaactggcaatggtactcaagtgtacttaacccccacgctgctatgttcgggtgtcccgacgctgtcgctcattttaatcatcttgcttctgtgcttcgtgccccgcaaaacccaccccctcccggtccccagcgaaacctgcccctccgacgggtgccggctctcccggctgcgccagaggcgcccggagatagagcaccatggcctatggcttgtggcaccgaaggagaagacggtggcgcaggtggaaacgcacaccatggaagcgccgctggaggacccgaagacgcagacctgctagacgccgtggccgccgcagaaacgtaa

SEQ ID NO: 588 - DNA, 453 bp, Torque teno virus
  source 1..453: mol_type = other DNA
atgtttattggcaggcattacagaaagaaaagggcgctgtcactgtgtgctgtgcgaacaacaaagaaggcttgcaaactactaatagtaatgtggaccccacctcgcaatgatcaacagtaccttaactggcaatggtactcaagtgtacttagctcccacgctgctatgtgcgggtgtcccgacgctgtcgctcattttaatcatcttgcttctgtgcttcgtgccccgcaaaacccaccccctcccggtccccagcgaaacctgcccctccgacggctgccggctctcccggctgcgccagaggcgcccggagatagagcaccatggcctatggctggtggcgccgaaggagaagacggtggcgcaggtggagacgcagaccatggaggcgccgctggaggacccgaagacgcagacctgctagacgccgtggccgccgcagaaacgtaa

SEQ ID NO: 589 - DNA, 453 bp, Torque teno virus
  source 1..453: mol_type = other DNA
atgtttattggcaggcattacagaaagaaaagggcgctgtcactgtgtgctgtgcgaacaacaaagaaggcttgcaaactactaatactaatgtggaccccacctcgcaatgaccaacagtaccttaactggcaatggtactcaagtatacttagctcccacgctgctatgtgcgggtgtcccgacgctgtcgctcattttaatcatcttgcgtctgtgcttcgtgccccgcaaaacccaccccctcccggtccccagcgaaacctgcccctccgacggctgccggctctcccggctgcgccagaggcgcccggagatagagcaccatggcctatggctggtggcgccgaaggagaagacggtggcgcaggtggagacgcagaccatggaggcgccgctggaggacccgaagacgcagacctgctagacgccgtggccgccgcagaaacgtaa

SEQ ID NO: 590 - DNA, 453 bp, Torque teno virus
  source 1..453: mol_type = other DNA
atgtttattggcaggcattacagaaagaaaagggcgctgtcactgtgtgctgtgcgaacaacaaagaaggcttgcaaactactaatactaatgtggaccccacctcgcaatgaccaacagtaccttaactggcaatggtactcaagtatacttagctcccacgctgctatgtgcgggtgtcccgacgctgtcgctcattttaatcatcttgcttctgtgcttcgtgccccgcaaaacccaccccctcccggtccccagcgaaacctgcccctccgacggctgccggctctcccggctgcgccagaggcgcccggagatagagcgccatggcctatggctggtggcgccgaaggagaagacggtggcgcaggtggagacgcagaccatggaggcgccgctggaggacccgaagacgcagacctgctagacgccgtggccgccgcagaaacgtaa

SEQ ID NO: 591 - DNA, 387 bp, Torque teno virus
  source 1..387: mol_type = other DNA
atgccgtggagaccgccggtacataacgttccaggtcgcgaaaatcaatggtttgcagcgttttttcactcgcatgcttctttctgcggctgtggtgaccctgttgggcatattaacagcattgctcctcgctttcctaacgccggtccaccgagaccacctccagggctagagcagcagaaccccgagggcccgacgggtcccggaggtccccccgccatcttgccagctctgccggccccggcagaccctgaaccgccgccacggcttggtggtggggcagatggaggcgccgctggaggcctcgctatcgcagacgcacctggagggtacgaagaagacgacctagacgaacttttcgccgccgccgccgaggacgatatgtga

SEQ ID NO: 592 - DNA, 387 bp, Torque teno virus
  source 1..387: mol_type = other DNA
atgccgtggagaccgccggcacataacgttccgggtagggaaaatcaatggttcgcagctgtgtttcactcgcatgcttcttggtgcggctgtggtgacgttgttgggcatcttaataccattgctactcgctttcctaacgccggtcccccgagaccacctccagggctagaccagcagaaccccgagggcccggcgggtcccggaggtccccccgccatcttgcctgctctgccggccccggcagaccctgaaccgccgccacggcgtggtggtggggcagatggaggcgtcgatggaggcctcgctatcgcaaacgcacctggagattacggagacgacgacctagacgaacttttcgccgccgccgccgaagacaatatgtga

SEQ ID NO: 593 - DNA, 387 bp, Torque teno virus
  source 1..387: mol_type = other DNA
atgccgtggaaaccgccgcgacataacgttccgggtagggaaaaccaatggtttgcagcagtgtttcactcgcatgcttcttggtgcggctgtgctgacgttgttggccatcttaatagcattgctactcgctttcctaacatcggtcccccgagaccacctccagggctagaccagcagaaccccgagggcccggcgggtcccggaggtccccccgccatcttgcctgctctgccggccccggcaaaccctgaaccgccgccacggcgtggtggtggggcagatggaggcgccgctggaggcctcgctatcgcagacgcacctggagggtacgcagaagacgacctagacgaacttttcgccgccgccgccgaggacgatatgtga

SEQ ID NO: 594 - DNA, 450 bp, Torque teno virus
  source 1..450: mol_type = other DNA
atgtttcctggtaggatccacagaaagaaaaggaaagtgctattgtccccactgcaccctgcaccgaaaactcgccgggttatgagctggtctcgtccaatacacgatgccccagccattgagcgtaactggtgggaatccacagctcgatcccacgcatgttgctgtggctgcggtaattttgttaatcatattaatgtactggctaatcggtatggctttactggctccgcgcacacgccgggtggtccccggccgaggcccccgacagtgagctctggtcccagtacttcctaccgacaccccgagaccggctttaccatggcatggggatactggtggagaaggcgcttctgcgaccgaggagacgctggaagaaggtggcggcgccgccgagactacaacccagaagatctcgacgctctgttcgacgccctcgacgaagagtaa

SEQ ID NO: 595 - DNA, 348 bp, Torque teno virus
  source 1..348: mol_type = other DNA
atgagctttgtagaacccttactaaccagcacccacagagagatagcatactaccatggctgtgttcagatgcacaaagccttctgtgggtgtgacaactttcttacccacctgcaacgcataacaacatacatctctgctaaccaacacactccacccagcacaccctcaaacaccctccgtagagcccgggccctgcccgcggctccggagccagctccatggcgtggacctggtggtggcagaggaggcgccgaaggtggccgtggagaaggagaaggtggagaagactacgcacaagaagacctagacgccttgttcgacgccgtcgcaagagatacagagtaa

SEQ ID NO: 596 - DNA, 465 bp, Torque teno virus
  source 1..465: mol_type = other DNA
atgcacttttctcgaataaacagaaagaaaaagaaagtgctactgctttgcgtgccagcagctaagaaaaaaccaactgctatgagcttctggagacctccggtgcacaatgtcacggggatccagcgcctgtggtacgagtcctttcaccgtggccatgctgctttttgtggttgtggggatcctatacttcacattactacacttgctgagacatatggccatccaacaggcccgagaccttctgggtcatcgggagtagaccccggccccaatatccgtcgagccaggcctgccccggccgctccggagccctcacaggttgattccagaccggccctgccatggcatggggatggtggaagcgacggcggcgctggtggttccggaagcggtggacccgtggcagacttcgcagacgatggcctagaccagctcgtcggcgccctagacgacgaagagtaa

SEQ ID NO: 597 - DNA, 453 bp, Torque teno virus
  source 1..453: mol_type = other DNA
atgcacttttctaggatacaaagaaagaaaaggctattgctactgcagacactgccagcttcaaagaaaactaggcaacttctgagaggtatgtggagcccacccacagacgatgaacgtgtccgtgagcgtaaatggctcctctcagtttttcagtctcactgtgctttctgtggctgcaatgatcctatcggtcacctttgtcgcttggctactctgtctaaccgcccggagagcccggggccctccggaggaccccgtactcctcagatccggcacctacccgctctcccggctgctccccaagagcccggtgatcgagcaccatggcctatggctggtgggcccggagacggagacgctggcgccgctggaagcgcaggccctggagacgccgatggaggacccgcagacgcagacctcgtcgccgctatagacgccgcagacatgtaa

SEQ ID NO: 598 - DNA, 471 bp, Torque teno virus
  source 1..471: mol_type = other DNA
atgcactttcgcagagtctcagcgaaaaggaaactgctactgcttcctctgcaccctgcatcgcagacacctgccatgagcttcagggcgccctctcttaatgccggtcaacgagagcagctatggttcgagtccatcgtccgatcccatgacagttattgcgggtgtggtgatactgtcgctcattttaataacattgctactcgctttaactatctgcctgttacctcctcgcctctggatccttcctcgggcccgccgcgaggccgtccagcgctccgcgcactcccggctctgccagcggcaccctccaccccctctactagccgaccatggcgtggtggggcagatggagaaggtggccgcggcgccggtggaggagatggcggcgccgccgtagaaggagactaccaacaagaagaactcgacgagctgttcgcggccttggaagacgaccaagaaagacggtaa

SEQ ID NO: 599 - DNA, 444 bp, Torque teno virus; identical to SEQ ID NO: 102
  source 1..444: mol_type = other DNA

SEQ ID NO: 600 - DNA, 441 bp, Torque teno virus
  source 1..441: mol_type = other DNA
atgtttcttggtaaaatttacagacagaaaaggaaagtgccactgtacggcctgccagctccaaagaaaaaaccacctactgctatgagccactggagcagacccgtccaccatgcaacggggatcgagcacctctggtaccagtctgttattaacagccattctgctagctgcggttgtggcgatcctgtacgccactttacttatcttgctgagaggtatggctttgccccaacttcccgggccccgccggtagccccaacgcccaccatccgtagagccaggcccgcgcctgccgctccggagccccgtgccctaccatggcatggggatggtggagacgaaggcgcaagtggtggtggagacgccggttcgcccgaagcagacttcgcagacgacggattagacgccctcgtcgccgcactcgacgaagaacagtaa

SEQ ID NO: 601 - DNA, 453 bp, Torque teno virus
  source 1..453: mol_type = other DNA
atgtttctcggcaggccttacagaaagaagaggcaagtgccactgcctggcgtgcaccatccaccgcacccacggcctagcatgagccaccactggcgggagcccatcgacaatgtccccaaccgggagaggcactggctcgggtccgtcctccgaggccaccgagctttttgtggttgtcgggatcctgtgcttcattttactaatctggttgcacgttacaatcttcagggcggtggtccctcagcgggtagtcttagggatccgccgccactgaggagggcgctgccgccaccgccgtccccccgaccgccatgtcctggtggggatggcgccgccgatggtggtggaagccacggaggcgatggagacgcaggagggcgcgccgcccgagacgactaccgcgacgacgatatagaagacctactcgccgctatcgaggcagacgagtaa

SEQ ID NO: 602 - DNA, 426 bp, Torque teno virus
  source 1..426: mol_type = other DNA
atgcgattttctcgaatttatcgcagaaagaagaggctactgccactgctactggtgccaacagaaccgaaagaacaatttgtgatgagctggcgctgtcccttagaaaatgcctataagagggaaattaacttcctcagagggtgccaaatgcttcacacttgtttttgtggttgtgatgattttattaatcatattattcgcctacaaaatcttcacgggaatttacaccaacccaccggcccgtccacacctccagtaggccgtagagctctggccctgccggcagctccggaaccatggcgtggagatggtggtgggcccgaaggcgaccgaaccgccgatggacccgcagacgctggaggagactacgcacccggagacctagacgacctgttcgccgccgccgccgccgaccaagagtaa

SEQ ID NO: 603 - DNA, 492 bp, Torque teno virus
  source 1..492: mol_type = other DNA
atgggcaacgctcttagggtattcattcttaaaatgtttatcggcagggcctaccgccacaagaaaaggaaagtgctactgtccgcactgcgagctccacaggcgtctcggagggctatgagttggagaccccctgtacacgatgcgcccggcatcgagcgcaattggtacgaggcctgtttcagagcccacgctggaacttgtggctgtggcaattttattatgcacattaatcttctggctgggcgttatggttttactccggtatcagcaccaccaggtggtcctcctccgggcaccccgcagataaggagagccagacctagtcccgccgcgcccgaacagccccaggccctaccatggcatggggatggtggagacggtggcgccggtggcccaccagacgctggaggagacgccgtcgccggcgccccgtacggagaacaagagctcgccgacctgctcgacgctatagaagacgacgaacagtaa

SEQ ID NO: 604 - DNA, 1665 bp, Torque teno virus
  source 1..1665: mol_type = other DNA
atggcacacccgggcatgatgatgctaagcaaaatgaaaatactagtacccagttctgacaccagaccggggggcagacgcagagtaaaagttaaaataagacccccggcccttttagaagacaagtggtacactcagcaagatctagcgcccgttaatcttgtgtcacttgtggtttctgcgactagcttcatacatccgtttagccaaccacaaacgaacaacatttgcacaacttttcaggtgttgaaagacatgtactatgactgcataggagttagttccactttagacgacaaatataaaaaattatttcaaaaattatacactaaatgctgctactttgaaacatttcaaacaatagcccagctaaaccccggctttaaatctgctaaaaaaactacaactggctccggtaaggaagctgccacactaggcgacgcagttacacaattaaaaaaccaacacggtagtttttatactggaaacaatagtacttttggctgctgtacatataaccccactgaagaaataggtaaagcagcaaatgagtggttctggaaccaattaactgcaacagagtcagacacactaggacagtacggacgtgcctcaattaagtactttgaatatcacacaggactatacagttccatatttttaagtccactaaggagcaacctagaattttctacagcataccaggatgtaacatacaatccactgacagacctaggcataggcaacagaatctggtaccaatacagtaccaagccagacactacatttaacgaaacacagtgcaaatgtgtactaactgacctgcccctgtggtccctgttttatggatacgtagactttatagagtcagagctaggcataagcgcagagatacacaactttggcatagtttgcgttcagtgcccatacacctttccacccatgttcgacaagtctaagccagacaagggctacgtattttatgacaccctttttggtaacggaaagatgccagacggttccggacacgtacctacctactggcagcagagatggtggccaagatttagcttccagagacaagtaatgcatgacattattctgactggaccttttagttacaaagatgactctgtaatgactggactaacagcaggctacaagtttaaattcacatggggcggtgatatgatctccgaacaggtcattaaaaaccccgacagaggtgacggacgcgaatcctcctatcccgatagacagcgccgcgacctacaagttgttgaccctcgctccatggggccccaatgggtattccacacctttgactacaggaggggactatttggaaaggacgctattaaacgagtgtcagaaaaaccgacagatcctgactactttacaacaccttacaaaaaaccgaggtttttccccccaacagcaggagaagaaagactgcaagaagaaaactacactttacaggagaaaagagacccgttctcgtcagaagaggggccgcagaggacgcaagtcctccagcagcaggtcctccagtcggagctccagcagcagcaggagctcggggaccagctcagattcctcctcagggaaatgttcaaaacccaagcgggtatacacatgaacccccgcgcatttcaagagctgtaa

SEQ ID NO: 605 - DNA, 342 bp, Torque teno virus
  source 1..342: mol_type = other DNA
atgagctggtgtactccagttgaaaatgcctataagagagagatccactttctcaggggctgtcaactgcttcacactagcttttgtggttgcgatgattttattaatcatattattcgcctacaaaatcttcacggcaacctacaccagcccacgggaccgtccacacctccagtgacccgtagagctctggccttgccggctgctccggagtcatggcgttccggtggtggtggtggagacgccgcccgcagcgacgatggacccggcgccgatggaggagactacgaacccgccgacctagacgcactgtacgacgccgtcgccgcagaccaagagtaa

SEQ ID NO: 606 - DNA, 348 bp, Torque teno virus
  source 1..348: mol_type = other DNA
atgagctttgtagaaccgttactaagcagcacccaccgagagatagcattctaccatggctgtgttcaaatgcacaaggccttctgtggctgtgacaactttcttacccacctgcagcgcataacaacatacatctctgctaatcaacacactccacccagcacaccctcaaacaccctccgtagagcccgggccctgcccgcggctccggagccagctccatggcgtggacctggtggtggcagaggaggcgccgaaggtggccgtggagaaggagaaggtggagaagactacgcaccagaagacctagacgacttgttcgccgccgtcgcaagagatacagagtaa

SEQ ID NO: 607 - DNA, 405 bp, Torque teno virus
  source 1..405: mol_type = other DNA
atgagtctgtggcgacccccggtccacaatgcccccggcagagagagactttggtttcaggcctgttacgaatctcacagtgctttttgtggctgtggtagctttattcttcatcttactagcttggctgcacgttttaattttcaggccgggccaccgcctcccgggggtccccgggcggagaccccgccgattctgagggcgctgccggcaccccagccgcgccgccaccgccagacggagaaccccgggtctgagccatggcctggagatggtggtggagacggcgctggaagccaagaaggcggccagcgtggaccaagtaccgcagacgcaggtggagacgacttcgaccccgcagacctagaagacttgctcgcggccgtcgaagaagacgaacagtaa

SEQ ID NO: 608 - DNA, 390 bp, Torque teno virus
  source 1..390: mol_type = other DNA
atgaatctctggcgaccccctctgagaaatatcccccacagggagagatgttggcttgaggcctgtctcagagcccacgattctttttgtggctgtcctagtcctattgttcatttttctagtctggttgcacgttttaatctacaaggaggcccgccgccagaggatgactccccacagggcgcgccagtcctgagggccctgccggcaccgagcccccacaggcacacccgcacggagaacccctccggtgagccatggcctactcctactggtggcgccgccggaggtggccgtggagaggccgatggaggcgctggaggcgccgcagacgaataccgcgccgaagacctagacgacctgttcgccgctatcgaaggagaccagtaa

SEQ ID NO: 609 - DNA, 381 bp, Torque teno virus
  source 1..381: mol_type = other DNA
atgccgtggagaccgccggctcataacgtccaggggcgagagagccagtggttcgcggcttgttttcacggccacgcttcgttttgcggctgcggtgactttattgggcatattaacagccttgctcctcgctttcctaacaaccaaggacccccgcatccacctgccttaaacaggccacctgcacagggcccagaaagccccgggggttccatactacccctgccagccctaccggcaccacctgatccgccaccacggcctggtggtggggaagacggtggcgacgccgcccgtggggccgctggcgccgccgaaggcgcgtatggagaagaagacctagaactgctgttcgccgccgccgaggaagacgatatgtga

SEQ ID NO: 610 - DNA, 393 bp, Torque teno virus
  source 1..393: mol_type = other DNA
atgccgtggagaccgccggtgcatagtgtccaggggcgagaggatcagtggttcgcgagcttttttcacggccacgcttcattttgcggttgcggtgacgctgttggccatcttaatagcattgctcctcgctttcctcgcgccggtccaccaaggccccctccggggctagagcagcctaaccccccgcagcagggcccggccgggcccggagggccgcccgccatcttggcgctgccggctccgcccgcggagcctgacgacccgcagccacggcgtggtggtggggacggtggcgccgccgctggcgccgcaggcgaccgtggagaccgagactacgacgaagaagagctagacgagcttttccgcgccgccgccgaagacgatttgtaa

SEQ ID NO: 611 - DNA, 339 bp, Torque teno virus
  source 1..339: mol_type = other DNA
atgccgtggtctctgccgagacataatatcagaacgagagaagatctctgggtgcaatcgattctttattcacatgacactttttgtggctgtgataatattcctgagcatcttactggcctcctgggcggcgtacgaccagctccacctagaaacccaggaccccctaccatacggagcctgccggcactgccgccagctccggaaccccctgaggaaccacggcgtggtggagatacagacggagaccgtggagaagatggaggagacgccgctggggcctacgaacccgaagacctagaagaacttttcgccgccgccgagcaagacgatatgtga

SEQ ID NO: 612 - DNA, 354 bp, Torque teno virus
  source 1..354: mol_type = other DNA
atgtcgtggagaccgccgagccaaaatttactgcaaagagaagaggcctggtactcagcttttcttagctcgcattctacattttgcggttgtactgaccctctgctgcatattactctcattgctggccgccttactaaccccgtacccgtcacccgccaaccggagacccctcctaacggcctcagggggctgccggcactgccagcaccccctgaaccaccagcaccgccaccacggcctggggatggtaccggagaagaagatggcgcccatggagaaggagaaggtgggcgatacgcagaagaagacctagaagaactgttcgccgccgcggcagaagacgatatgtga

SEQ ID NO: 613 - DNA, 303 bp, Torque teno virus
  source 1..303: mol_type = other DNA
atgtcgtgggctccgccgctattcaactcgaaacagagagaggaccagtggtaccagtcaattattttcagccataatactttttgcggctgcggtgaccttgttaggcatttttgcgtcgttgcttctcgctttactgagcctcctgtagtgccggccctaccggcaccggtaccggcaccgccacggcgtggtacagaagaagaaggtggagaccgtggagaagacgccgcagaccgtggaccctacgcagaagaagagctagaagatttgttcgccgccgcccgagaagacgatatgtga

SEQ ID NO: 614 - DNA, 345 bp, Torque teno virus
  source 1..345: mol_type = other DNA
atgccgtggcatccaccgggctacaacgttcaacagagagaagagctctgggtacagacagttactacttcacatgctactttttgcggctgtggtgaccctagtagccatcttcaccgcattcttagccgccttaataacagcagccggcggccccccgaaaccccaaaccccattcgtgccctaccggccctaccggcaccccaagaacctgaacagccgccatcacggcctggtaccggtacagaagaaggccatggcgccgaaggaggcgaccgaggtggggcctacgcagaagaagatttagaagatcttttcgcggccgcggaagaagacgatatgtga

SEQ ID NO: 615 - DNA, 387 bp, Torque teno virus
  source 1..387: mol_type = other DNA
atgtcgtggcgaccgccgttgcattctatccaaggcagagaagatcaatggtatgcaggcatctttcatacgcattttgctttttgcggttgtggtgaccctgttgggcgtattaaccgcattgctcaccgctttcctaacgccggtcccccgagaccacctccagggctagaccagcccaacctcggagggccggaaggtccaggaggtgcccctagagccctgccagccctgccggccccggcagagccagagccggcaccacggcgtggtggtggggccgatggagacagcgccgctggggccgccgccgccgcagaccatggagggtacgacgaaggagacctagaagatcttttcgccgccgccgccgaggacgatatgtga

SEQ ID NO: 616 - DNA, 393 bp, Torque teno virus
  source 1..393: mol_type = other DNA
atgagtatttggaggcctccactgcacaatgtcccgggactcgaacacctctggtacgagtcagtgcatcgtagccatgctgctgtttgtggctgtggggatcctgtacgccatcttactgctcttgctgaaagatatggcattccgggagggtcgcggtcttctggggcaccgggagtagggggcaaccacaaccctccccagatccgtcgagcccgccacccggcggctgctccggaccccccagcaggtaaccagcctccggccctgccatggcatggggatggtggaaacgaaagcggcgctggtggtggagaaagcggtggacccgtggccgacttcgcagacgatggcctagacgatctcgtcgccgccctcgacgaagaagagtaa

SEQ ID NO: 617 - DNA, 384 bp, Torque teno virus
  source 1..384: mol_type = other DNA
atgagcttctggagacctccggtgcacaatgccacggggatccagcgcctgtggtacgagtcctttcaccgtggccatgctgctttttgtggttgtggggatcctatacttcacattactgcacttgctgagacatatggccatccaacaggcccgagaccttctgggccaccgcgagtagaccccgatccccagatccgtagagccaggcctgccccggccgctccggagccctcacaggttgagccgagacctgccctgccatggcatggggatggtggaagcgacggcggcgctggtggttccggaagcggtggacccgtggcagacttcgcagacgatggcctcgatcagctcgtcgccgccctagacgacgaagagtaa

SEQ ID NO: 618 - DNA, 489 bp, Torque teno virus
  source 1..489: mol_type = other DNA
atgggcaaggctcttagagtatttattcttaatatgcgcttttccagaatttacaaacagaagaagaggccactgccactgcttctggtgcgagttgaaccgaaagcattcgctagtgatatgagttggcgccctcccgttcacaatgcggcaggaattgagcgacagctccttgagggctgctttcgatttcacgctgcctgttgcggttgtggcagttttattactcatcttactatactggctgctcgctatggttttactggggggccggcgccgccaggtggtcctggggcgctgccatcgctgagacgggctcagcccgcgccggcggcccccgagaaccagcctgaaccagagctatggcgtggtcgtggtggtggaggcgacggaaacgctggtggccgcgcagaaggaggcgatggaggagatttcgcacccgaagagctagacgagctgttccgcgccgtcgccgccgacgaagagtaa

SEQ ID NO: 619 - DNA, 489 bp, Torque teno virus; identical to SEQ ID NO: 618
  source 1..489: mol_type = other DNA

SEQ ID NO: 620 - DNA, 489 bp, Torque teno virus
  source 1..489: mol_type = other DNA
atgggcaaggctcttagagtattcattcttaatatgcgcttttccagaatttacaaacagaagaagaggccactgccactgcttctggtgcgagttgaaccgaaagcactcgctagtgatatgagttggcgccctcccgttcacaatgcggcaggaattgagcgacagctccttgagggctgctttcgatttcacgctgcctgttgcggttgtggcagttttattactcatcttactatactggctgctcgctatggttatactggggggccggcgccgccaggtggtcctggggcgctgccatcgctgagacgggctctgcccgcgccggcggcccccgagaaccagcctgaaccagagctatggcgtggtcgtggtggtggaggcgacggaaacgctggtggccgcgcagaaggaggcgatggaggagatttcgcacccgaagagctagacgagctgttccgcgccgtcgccgccgacgaagagtaa

SEQ ID NO: 621 - DNA, 489 bp, Torque teno virus; identical to SEQ ID NO: 620
  source 1..489: mol_type = other DNA

SEQ ID NO: 622 - DNA, 489 bp, Torque teno virus
  source 1..489: mol_type = other DNA
atgggcaaggctcttagagtattcattcttaatatgcgcttttccagaatttacaaacagaagaagaggccactgccactgcttctggtgcgagttgaaccgaaagcactcgctagtgatatgagttggcgccctcccgttcacaatgcggcaggaattgagcgacagctccttgagggctgctttcgatttcacgctgcctgttgcggttgtggcagttttattactcatcttactatactggctactcgctatggttttactggggggccggcgccgccaggtggtcctggggcgctgccatcgctgagacgggctctgcccgcgccggcggcccccgagaaccagcctgaaccagagctatggcgtggtcgtggtggtggaggcgacggaaacgctggtggccgcgcagaaggaggcgatggaggagatttcgcacccgaagagctagacgagctgttccgcgccgtcgccgccgacgaagagtaa

SEQ ID NO: 623 - DNA, 489 bp, Torque teno virus; identical to SEQ ID NO: 622
  source 1..489: mol_type = other DNA

SEQ ID NO: 624 - DNA, 492 bp, Torque teno virus
  source 1..492: mol_type = other DNA
atgggcaaggctcttagggtcttcattcttaatatgttccttggcagggtttaccgccacaagaaaaggaaagtgctactgtctacactgcgagctccacaggcgtctcgcagggctatgagtcggcgacccccggtacacgatgcacccggcatcgagcgcaattggtacgaggcctgtttcagagcccacgctggagcttgtggctgtggcaattttattatgcaccttaatcttctggctgggcgttatggttttactccggggtcagcgccgccaggtggtcctcctccgggcaccccgcagataagaagagccagacctagtcccgccgcaccccaagagcccgctgctctaccatggcatggggatggtggagatggcggcgccgctggcccgccagacgctggaggagacgccgtcgccggcgccccgtacggagaacaagagctcgccgacctgctcgacgctatagaagacgacgaacagtaa

SEQ ID NO: 625 - DNA, 492 bp, Torque teno virus
  source 1..492: mol_type = other DNA
atgggcaaggctcttagggtcttcattcttaatatgttccttggcagggtttaccgccacaagaaaaggaaagtgctactgtccacactgcgagctccacaggcgtctcgcagggctatgagttggcgacccccggtacacgatgcacccggcatcgagcgcaattggtacgaggcctgtttcagagcccacgctggagcttgtggctgtggcaattttattatgcaccttaatcttctggctgggcgttatggttttactccggggtcagcgccgccaggtggtcctcctccgggcaccccgcagataagaagagccagacctagtcccgccgcaccccaagagcccgctgctctaccatggcatggggatggtggagatggcggcgccgctggcccgccagacgctggaggagacgccgtcgccggcgccccgtacggagaacaagagctcgccgacctgctcgacgctatagaagacgacgaacagtaa

SEQ ID NO: 626 - DNA, 492 bp, Torque teno virus
  source 1..492: mol_type = other DNA
atgggcaaggctcttagggtcttcattcttaatatgttccttggcagggtttaccgccacaagaaaaggaaagtgctactgtccacactgcgagctccacaggcgtctcgcagggctatgagttggcgacccccggtacacgatgcacccggcatcgagcgcaattggtacgaggcctgtttcagagcccacgctggggcttgtggctgtggcaattttattatgcaccttaatcttctggctgggcgttatggttttactccggggtcagcgccgccaggtggtcctcctccgggcaccccgcagataagaagagccagacctagtcccgccgcaccccaagagcccgctgctctaccatggcatggggatggtggagatggcggcgccgctggcccgccagacgctggaggagacgccgtcgccggcgccccgtacggagaacaagagctcgccgacctgctcgacgctatagaagacgacgaacagtaa

SEQ ID NO: 627 - DNA, 465 bp, Torque teno virus
  source 1..465: mol_type = other DNA
atgcacttttctcgaataagcagaaagaaaaggaaagtgctactgctttgcgtgccagcagctaagaaaaaaccaactgctatgagcttctggagacctccggtgcacaatgtcacggggatccagcgcctgtggtacgagtcctttcaccgtggccatgctgctttttgtggttgtggggatcctatacttcacattacttcacttgctgagacatatggccatccaacaggcccgagaccttctgggtcatcgggaatagaccccactccgcccatccgtagagccaggcctgccccggccgctccggaaccctcacaggttgactccagaccggccctgccatggcatggagatggtggaagcgacggaggcgctggtggttccgcaagcggtggacccgtggcagacttcgcagacgatggcctcgaccagctcgtcgccgacctagacgacgaagagtaa

SEQ ID NO: 628 - DNA, 465 bp, Torque teno virus; identical to SEQ ID NO: 627
  source 1..465: mol_type = other DNA

SEQ ID NO: 629 - DNA, 465 bp, Torque teno virus
  source 1..465: mol_type = other DNA
atgcacttttctcgaataagcagaaagaaaaggaaagtgctactgctttgcgtgccagcagctaagaaaaaaccaactgctatgagcttctggagacctccggtgcacaatgtcacggggatccagcgcctgtggtacgagtcctttcaccgtggccatgctgctttttgtggttgtggggatcctatacttcacattacttcacttgctgagacatatggccatccaacaggcccgagaccttctgggtcatcgggaatagaccccactccgcccatccgtagagccaggcctgccccggccgctctggaaccctcacaggttgactccagaccggccctgccatggcacggagatggtggaagcgacggaggcgctggtggttccgcaagcggtggacccgtggcagacttcgcagacgatggcctcgaccagctcgtcgccgacctaaacgacgaagagtaa

SEQ ID NO: 630 - DNA, 465 bp, Torque teno virus
  source 1..465: mol_type = other DNA
atgcacttttctcgaataagcagaaagaaaaggaaagtgctactgctttgcgtgccagcagctaagaaaaaaccaactgctatgagcttctggagacctccggtgcacaatgtcacggggatccagcgcctgtggtacgagtcctttcaccgtggccatgctgctttttgtggttgtggggatcctatacttcacattacttcacttgctgagacatatggccatccaacaggcccgagaccttctgggtcatcgggaatagaccccactccgcccatccgtagagccaggcctgccccggccgctccggaaccctcacaggttgactccagaccggccctgccatggcatggagatggtggaagcgacggaggcgctggtggttccgcaagcggtggacccgtggcagacttcgcagacgatggcctcgaccagctcgtcgccgacctaaacgacgaagagtaa

SEQ ID NO: 631 - DNA, 465 bp, Torque teno virus; identical to SEQ ID NO: 627
  source 1..465: mol_type = other DNA

SEQ ID NO: 632 - DNA, 483 bp, Torque teno virus
  source 1..483: mol_type = other DNA
atgtttttcggtagacattggcgaaagaaaagggcactgttactgtctagcttgcgaacttcaaagaagaaaccacctgcaatgagccagtggtgcccgcctgtgcacagcgttcagggtcgcaaccaccagtggtatgaagcctgctaccgtggccatgctgcttattgtggctgtggcgattttattagtcaccttgttgctctgggtaatcagtttggcttcaggccgggtccccgagctcctggcgcaccggggctagggggaccccccgttctgccccgtagagccctgccggcacccccggctgaggctccggagcaccagcagggcaacaacaacaacaaccagcagctgcagagatggcctggggatggtggaaacgcagacggcgccgatggtggagaggcctctggaggagacgccgctttgccagaagacgacctagacggcctgctcgccgccctagacgacgaagagtaa

SEQ ID NO: 633 - DNA, 483 bp, Torque teno virus
  source 1..483: mol_type = other DNA
atgtttttcggtaggcattggcgaaagaaaagggcactgttactgtctagcttgcgaacttcaaagaagaaaccacctgcaatgagccagtggtgcccgcctgtgcacagcgttcagggtcgcaaccaccagtggtatgaagcctgctaccgtggccatgctgcttattgtggctgtggcgattttattagtcaccttgttgctctgggtaatcagtttggcttcgggccgggtccccgagctcctggcgcaccggggctagggggaccccccgttctgccccgtagagccctgccggcacccccggctgaggctccggagcaccagcagggcaacaacaacaacaaccagcagctgcagagacggcctggggatggtggaaacgcagacggcgccgatggtggagaggcctctggaggagacgccgctttgccagaagacgacctagacggcctgctcgccgccctagacgacgaagagtaa

SEQ ID NO: 634 - DNA, 483 bp, Torque teno virus
  source 1..483: mol_type = other DNA
atgtttttcggtaggcattggcgaaagaaaagggcactgttactgtctagcttgcgaacttcaaagaagaaaccacctgcaatgagccagtggtgcccgcctgtgcacagcgttcagggtcgcaaccaccagtggtatgaagcctgctaccgtggccatgctgcttattgtggctgtggcgattttattagtcaccttgttgctctgggtaatcagtttggcttcaggccgggtccccgagctcctggcgcaccggggctagggggaccccccgttctgccccgtagagccctgccggcacccccggctgaggctccggagcaccagcagggcaacaacaacaacaaccagcagctgcagagatggcctggggatggtggaaacgcagacggcgccgatggtggagaggcctctggaggagacgccgctttgccagaagacgacctagacggcctgctcgccgccctagacgacgaagagtaa

SEQ ID NO: 635 - DNA, 465 bp, Torque teno virus
  source 1..465: mol_type = other DNA
atgcacttttctcgaataagcagaaagaaaaggaaagtgctactgctttgcgtgccagcagctaagaaacaaccaactgctatgagcttctggagacctccgatacacaatgtcacggggatccagcgcctgtggtacgagtcctttcaccgtggccatgctgctttttgtggttgtggggatcctatacttcacattactgcacttgctgagacatatggccatccaacaggcccgagaccttctgggtcatcgggaatagaccccactcccccaatccgtagagccaggcccgccccggccgctccggagccctcacaggctgagtccagaccggccctgccatggcatggagatggtggaagcgacggaggcgctggtggttccgcaagcggtggacccgtggcagacttcgcagacgatggcctcgaccagctcgtcgccgccctagacgacgaagagtaa

SEQ ID NO: 636 - DNA, 471 bp, Torque teno virus
  source 1..471: mol_type = other DNA
atgtttctcggcagggtgtggaggaaacagaaaaggaaagtgcttctgctggctgtgcgagctacacagaaaacatcttccatgagtatctggcgtccccctctcgggaatgtctcctacagggagagaaattggcttcaggccgtcgaaggatcccacagttccttttgtggctgtggtgattttattcttcatcttactaatttggctgcacgctttgctcttcaggggcccccgccggagggtggtcctcctcggccgaggccgccgctcctgagagcgctgccggcccccgaggtccgcagggaaacgcgcacagagaacccgggcgcctccggtgagccatggcctggcgatggtggtggcagagacgatggcgccgccgcccgtggccccgcagacggtggagacgcctacgacgccggagacctcgacgacctgttcgccgccgtcgaagacgagcaacagtaa

SEQ ID NO: 637 - DNA, 537 bp, Torque teno virus
  source 1..537: mol_type = other DNA
ctgccactgctacctgtgccagctacaccgcaagaacggcctagtcgtgcgcccctgatggcctgcggacccagaggatggatgccccccaacttcgggggacacgacagagaaaatgcttggtgcaaatctgttaaattgtctcatgatgctttctgtggctgcgacgatcctcttacccatcttgctgctctgctaccaagcagacaagcttctcgtcagaatactccttctgctccacctccgcgccccccgccgccgaccccgaggcagggccagggctctgggccgcctcaggggcgaatcagaccgtcctggtccctcccggtgaccccacccgctgacgagccatggcagcctggtggtggggcaggcggagacgctggcgcaggtggaggcgccgccgcctccctcgccgccgccgctggcgacggaggagacggtggcccagaagacgcaggcggagatggccgcgcagacgcagacgtcgcagacctgctcgccgccctagaaggagacgcagacgccgaagggtaa

SEQ ID NO: 638 - DNA, 369 bp, Torque teno virus
  source 1..369: mol_type = other DNA
gatcctcttacccatcttgctgctctgctaccaggcagacaagcttctcgtcagaatactccttctgctccacctccgcgccccccgccgccgaccccgaggcagggccagggctctgggccgcctcaggggcgaatcagaccgtcctggtccctcccggtgaccccacccgctgacgagccatggcagcctggtggtggggcaggcggagacgctggcgcaggtggaggcgccgccgcctccctcgccgccgccgctggcgacggaggagacggtggcccagaagacgcaggcggagatggccgcgcagacgcagacgtcgcagacctgctcgccgccctagaaggagacgcagacgccgaagggtaa

SEQ ID NO: 639 - DNA, 396 bp, Torque teno virus
  source 1..396: mol_type = other DNA
tctcatgatgctttctgtggctgcgacgatcctcttacccatcttgctgctctgctaccaggcagacaagcttctcgtcagaatactccttctgctccacctccgcgccccccgccgccgaccccgaggcagggccagggctctgggccgcctcaggggcgaatcagaccgtcctggtccctcccggtgaccccacccgctgacgagccatggcagcctggtggtggggcaggcggagacgctggcgcaggtggaggcgccgccgcctccctcgccgccgccgctggcgacggaggagacggtggcccagaagacgcaggcggagatggccgcgcagacgcagacgtcgcagacctgctcgccgccctagaaggagacgcagacgccgaagggtaa

SEQ ID NO: 640 - DNA, 507 bp, Torque teno virus
  source 1..507: mol_type = other DNA
caagaacggcctagtcgtgcgcccctgatggcctgcggacccagaggatggatgccccccaacttcgggggacacgacagagaaaatgcttggtgcaaatctgttaaattgtctcatgatgctttctgtggctgcgacgatcctcttacccatcttgctgctctgctaccaggcagacaagcttctcgccagaatactccttctgctccacctccgcgccccccgccgccgaccccgaggcagggccagggctctgggccgcctcaggggcgaatcagaccgtcctggtccctcccggtgaccccacccgctgacgagccatggcagcctggtggtggggcaggcggagacgctggcgcaggtggaggcgccgccgcctccctcgccgccgccgctggcgacggaggagacggtggcccagaagacgcaggcggagatggccgcgcagacgcagacgtcgcagacctgctcgccgccctagaaggagacgcagacgccgaagggtaa

SEQ ID NO: 641 - DNA, 531 bp, Torque teno virus
  source 1..531: mol_type = other DNA
ctgctacctgtgccagctacaccgcaagaacggcctagtcgtgcgcccctgatggcctgcggacccagaggatggatgccccccaacttcgggggacacgacagagaaaatgcttggtgcaaatctgttaaattgtctcatgatgctttctgtggctgcgacgatcctcttacccatcttgctgctctgctaccaggcagacaagcttctcgtcagaatactccttctgctccacctccgcgccccccgccgccgaccccgaggcagggccagggctctgggccgcctcaggggcgaatcagaccgtcctggtccctcccggtgaccccacccgctgacgagccatggcagcctggtggtggggcaggcggagacgctggcgcaggtggaggcgccgccgcctccctcgccgccgccgctggcgacggaggagacggtggcccagaagacgcaggcggagatggccgcgcagacgcagacgtcgcagacctgctcgccgccctagaaggagacgcagacgccgaagggtaa

SEQ ID NO: 642 - DNA, 591 bp, Torque teno virus
  source 1..591: mol_type = other DNA
atgttcctcggcaggccgtggagaaagaggagggcggccgggaagaaagggccactgccactgcaagctgtgcgagctgcatcgcaggaacggtctgacagtgcaccgctgatggcctgcggaccccggggatggatgcccccgaacttcgggggacacgagagagaaaatgcctggagccagtctgttgtactgtctcatgatgctttctgtggctgcgacgatcctgctacccatcttactgctctgctatcaggtagacaagcttctcgtcagagtactccttctgctccacctccgcgccccccgccgccgtccccgaggcagggccaggggtctcggtcacctccggggcgaatcagaccatcctggtccctcccggtagccccgccgagtgaagggccatggctgcctggtggtggggcaggaggcggcgatggcgccggtggagacggcgccgtctccctcgccgccgccgctggtgacggaggagacggtggcccaggaggcgtaggcggagatggccgcggagacgcagacgtcgcagacctgctcgccgccttagaaggagacgtcgacgcagaagggtaa

SEQ ID NO: 643 - DNA, 591 bp, Torque teno virus
  source 1..591: mol_type = other DNA
atgttcctcggcaggccgtggagaaagaggagggcggccgggaagaaagggccactgccactgcaagctgtgcgagctgcatcgcaggaacggtctcacagtgcaccgctgatagcctgcggaccccggggatggatgcccccgaacttcgggggacacgagagggaaaatgcctggagccagtctgttgtactgtctcatgatgctttctgtggttgcgacgatcctgctacccatcttactactctgctatcacgcagacaagcttctcgtcagagtactccttctgctccacctccgcgccccccgccgccgtccccgaggcagggccaggggtctcggtcgcctccgggacgaatcagaccatcctggtccctcccggtagccccgccgagtgaagggccatggctgcctggtggtggggcaggaggcggcgatggcgccggtggagacggcgccgtctccctcgccgccgccgctggcgacggaggagacggtggcccaggaggcgtaggcggagatggccgcggagacgcagacgtcgcggacctgctcgccgccttagaaggagacgtcgacgcagaagggtaa

SEQ ID NO: 644 - DNA, 591 bp, Torque teno virus
  source 1..591: mol_type = other DNA
atgttcctcggcaggccgtggagaaagaggagagcggcagggaagaaagggccactgccactgcaagctgtgcgggctgcatcgcaggaacggtctcacagtgcaccgctgatggcctgcggaccccggggatggatgcccccgaacttcgggggacacgagagagaaaatgcctggagccagtctgttgtactgtctcatgatgctttctgtggttgcgacgatcctgctacccatcttactactctgctatcacgcagacaagcttctcgtcagagtactccttctgctccacctccgcgccccccgccgccgtccccgaggcagggccaggggtctcggtcgcctccggggcgaatcagaccatcctggtccctcccggtagccccgccgagtgaagggccatggctgcytggtggtggggcaggaggcggcgatggcgccggtggagacggcgccgtytccctcgccgccgccgctggcgacggaggagacggtggcccaggaggcgtaggcggagatggccgcggagacgcagacgtcgcagacctgctcgccgccttagaaggagacgtcgacgcagaagggtaa

SEQ ID NO: 645 - DNA, 1083 bp, Torque teno virus
  source 1..1083: mol_type = other DNA
atggctgagtttatgctgcccgtccgcagagaggagccacggcgggggatccgaacgtcccgagggcgggtgccggaggtgagtttacacaccgcagtcaaggggcaattcgggctcgggactggccgggctatgggcaaggctcttaaaaaagccatgtttctcggtaaattacacagaaagaagagggcactgtcactgcacggcctgccagctacaaagaaaaaaccacctcctgatatgaactactggaggccgcctgtgcacaatgtcccggggctcgaacgcctctggtacgagtccgtgcatcgtagccatgctgctgtttgtggttgtggggattttgtacgccatattactgctctggctgagagatacggccaccctgggggaccgcgcgcgcctggggcaccgggaatagggggcaatcccaattctcccccgatccgtcgagcccgccacccggcggccgctccggagcccccagcaggtaaccagcctccggccctgccatggcatggggatggtggaaacgaaggcgcaagtggtggtggagacgacgctggactcgtggccgacttcgcaaacgacgggctagacgagctggtcgccgccctcgacgaagaagagtcccaaaaaacccagggtcgacctcgggccaatccaacagcaagaaaggccctccgattcactccaaagagaatcgaggccgtgggagaccagcgaagaagagagcgaagcagaagtccagcaagaagagacggaggaggtgcccctcagacagcaactcctccacaacctcagagagcagcagcaactccgaaagggcctccagtgcgtcttccagcagctaataaagacgcagcagggggttcacatagacccatccctactgtaggccccagtcagtggctcttccccgagagaaagcctaaaccccctccatcggccggagactgggccatggagtacctagcttgcaagatattcaacaggccgccccgcactcaccttacagaccctcctttctacccctactgcaaaaacaattacaatgtaacctttcagctcaactacaaataa

SEQ ID NO: 646 - DNA, 1056 bp, Torque teno virus
  source 1..1056: mol_type = other DNA
atggctgagtttatgctgcccgtccgcagagaggagccacggcgggggatccgaacgtcccgagggcgggtgccggaggtgagtttacacaccgcagtcaaggggcaattcgggctcgggactggccgggctatgggcaaggctcttaaaaaagccatgtttctcggtaaattacacagaaagaagagggcactgtcactgcacggcctgccagctacaaagaaaaaaccacctcctgatatgaactactggaggccgcctgtgcacaatgtcccggggctcgaacgcctctggtacgagtccgtgcatcgtagccatgctgctgtttgtggttgtggggattttgtacgccatattactgctctggctgagagatacggccaccctgggggaccgcgcgcgcctggggcaccgggaatagggggcaatcccaattctcccccgatccgtcgagcccgccacccggcggccgctccggagcccccagcaggtaaccagcctccggccctgccatggcatggggatggtggaaacgaaggcgcaagtggtggtggagacgacgctggactcgtggccgacttcgcaaacgacgggctagacgagctggtcgccgccctcgacgaagaagagttgttagagacccctgcactcagcccaccttcgaactgcccggagccagtacgcagcctccacgaatacaagtcacggacccgaaactcctcggtccccactactcattccactcgtgggacctcagacgtggctactatagcacaaagagtattaaacgaatgtcagaacacgaagaaccttctgagtttattttcccaggtcccaaaaaacccagggtcgacctcgggccaatccaacagcaagaaaggccctccgattcactccaaagagaatcgaggccgtgggagaccagcgaagaagagagcgaagcagaagtccagcaagaagagacggaggaggtgcccctcagacagcaactcctccacaacctcagagagcagcagcaactccgaaagggcctccagtgcgtcttccagcagctaa

SEQ ID NO: 647 - DNA, 633 bp, Torque teno virus
  source 1..633: mol_type = other DNA
atggctgagtttatgctgcccgtccgcagagaggagccacggcgggggatccgaacgtcccgagggcgggtgccggaggtgagtttacacaccgcagtcaaggggcaattcgggctcgggactggccgggctatgggcaaggctcttaaaaaagccatgtttctcggtaaattacacagaaagaagagggcactgtcactgcacggcctgccagctacaaagaaaaaaccacctcctgatatgaactactggaggccgcctgtgcacaatgtcccggggctcgaacgcctctggtacgagtccgtgcatcgtagccatgctgctgtttgtggttgtggggattttgtacgccatattactgctctggctgagagatacggccaccctgggggaccgcgcgcgcctggggcaccgggaatagggggcaatcccaattctcccccgatccgtcgagcccgccacccggcggccgctccggagcccccagcaggtaaccagcctccggccctgccatggcatggggatggtggaaacgaaggcgcaagtggtggtggagacgacgctggactcgtggccgacttcgcaaacgacgggctagacgagctggtcgccgccctcgacgaagaagagtaa

SEQ ID NO: 648 - DNA, 150 bp, Torque teno virus
  source 1..150: mol_type = other DNA
atggctgagttttccacgcccgtccgcagcgagatcgcgacggaggagcgatcgagcgtcccgagggcgggtgccgaaggtgagtttacacaccggagtcaaggggcaattcgggctcgggactggccgggctatgggcaaggctcttaa

SEQ ID NO: 649 - DNA, 150 bp, Torque teno virus
  source 1..150: mol_type = other DNA
atggctgagttttccatgcccgtccgcagcggtgaagccacggagggagctcagcgcgtcccgagggcgggtgccgaaggtgagtttacacaccgaagtcaaggggcaattcgggctcgggactggccgggctatgggcaaggctcttaa

SEQ ID NO: 650 - DNA, 150 bp, Torque teno virus
  source 1..150: mol_type = other DNA
atggctgagttttctatgcccgtccgcagcggcgaagccacggagggagctcagcgcgtcccgagggcgggtgccggaggtgagtttacacaccgaagtcaaggggcaattcgggctcgggactggccgggctatgggcaaggctcttaa

SEQ ID NO: 651 - DNA, 456 bp, Torque teno virus
  source 1..456: mol_type = other DNA
atgcacttttctaggatatccagaaagaaaaggctactgctactgcaaacagtgccagctccacagaaaactttcaaacttttaagaggtatgtggagtcctcccactgacgatgaacgtgtccgcgagcgaaaatggttcctcgcaactgtttattctcactctgctttctgtggctgcaatgatcctgtcggtcacctctgtcgcttggctactctttctaaccgtccggagaacccgggaccctccgggggacgtcgtgctccttcgatcggggtcctacccgctctcccggctgctaccgagcagcccggtgatcgagcaccatggcctatgggtggtggaggagacgccgcagaaggtggaagagatggaggagaaggcccaggtggagacgcccatggaggacccgcagacgcagacctgctagacgccgtggacgccgcagaacagtaa

SEQ ID NO: 652 - DNA, 456 bp, Torque teno virus
  source 1..456: mol_type = other DNA
atgcacttttctaggatacgcagaaagaaaaggctactgctactgcaaacagtgccagctccacagaaaactctcaaacttttaaaaggtatgtggagtcctcccaccgacgatgaacgtgtccgcgagcgaaaatggttcctcgcaactatttattctcactctactttctgtggctgcaatgatcctgtcggtcacttctgtcgcctggctactctgtctaaccgcccggaaaacccgggaccctccggaggacgtagtgctcctcagatcgggctcctacccgctctcccggctgctcccgagcaacccggtgatcgagcaccatggcttatgggtggtggaggagacgccgcaggaggtggaagagatggaggagaaggcccaggtggagacgcccatggaggacccgcagacgcagacctgctggacgccgtggacgccgcagaacagtaa

SEQ ID NO: 653 - DNA, 456 bp, Torque teno virus
  source 1..456: mol_type = other DNA
atgcacttttctaggatacacagaaagaaaaggctactgccactgcaaacagtgccaactccacagaaaactctcaaacttttaaaaggtatgtggagtcctcccaccgacgatgaacgtgtccgcgagcgaaaatggttcctcgcaactatctattctcactctactttctgtggctgcaatgatcctgtcgctcatttctgtcgcctggctactctctctaaccgcccggaaaacccgggaccctccggaggacgtagtgctcctcagatcgggctcctacccgctctcccggctgctcccgagcaacccggtgatcgagccccatggcctatgggtggtggaggagacgccgcaggaggtggaagagatggaggagaaggcccaggtggagacgccgctggaggacccgcagacgcagacctgctggacgccgtagacgccgcagaacagtaa

SEQ ID NO: 654 - DNA, 453 bp, Torque teno virus; identical to SEQ ID NO: 588
  source 1..453: mol_type = other DNA

SEQ ID NO: 655 - DNA, 174 bp, Torque teno virus
  source 1..174: mol_type = other DNA
atgtttggtgaccccaaaccttacaacccttccagtaatgactggaaagaggagtacgaggcctgtagaatatgggacagaccccccagaggcaacctaagagacacccctttctacccctgggcccccaaggaaaaccagtaccgtgtaaactttaaacttggatttcaataa

SEQ ID NO: 656 - DNA, 345 bp, Torque teno virus
  source 1..345: mol_type = other DNA
atgatgaatatgttgcagggcctttaccaagaaaaagaaacaaattcgataccagagcccaagggctgcaaacccccgaaaaagaaagctacactttactccaagccctccaagagtcggggcaagagaccagctcagaagaccaagaacaagcaccccaagaaaaagagggtcagaaggaagcgctcatggagcagctccagctccagaaacagcaccagcgagtcctcaagcgaggcctcaaactcctcctcggagacgtcctccgactccggagaggagtccactgggaccccctcctgtcataattcagggcccctctatcccagacctgcttttccctaa

SEQ ID NO: 657 - DNA, 345 bp, Torque teno virus
  source 1..345: mol_type = other DNA
atgatgaatatgttgcagggcctttaccaagaaaaagaaacaagttcgataccagagcccaagggctccaaagccccgaaaaagaaagctacactttactccaagccctccaagagtcggggcaagagagcagctcagaagaccaagaacaagcaccccaagaaaaagagggtcagaaggaagcgctcatggagcagctccagctccagaaacagcaccagcgagtcctcaagcgaggcctcaaactcctcctcggagacgttctccgactccggagaggagtacactgggaccccctcctgtcataattcagggcccctctatcccagacctacttttccctaa

SEQ ID NO: 658 - DNA, 345 bp, Torque teno virus
  source 1..345: mol_type = other DNA
atgatgaatatgttgcagggcctttaccaagaaaaagaaacaagttcgataccagagcccaagggctccaaagccccgaaaaagaaagctacactttactccaagccctccaagagtcggggcaagagacgagctcagaagaccaagaacaagcaccccaagaaaaagagggtcagaaggaagcgctcatggagcagctccagctccagaaacagcaccagcgagtcctcaagcgaggcctcaaactcctcctcggagacgttctccgactccggagaggagtacactgggaccccctcctgtcataattcagggcccctctatcccagacctgcttttccctaa

SEQ ID NO: 659 - DNA, 783 bp, Torque teno virus
  source 1..783: mol_type = other DNA
atgagctttgtagaacccttactaaccagcacccacagagagatagcatactaccatggctgtgttcagatgcacaaagccttctgtgggtgtgacaactttcttacccacctgcaacgcataacaacatacatctctgctaaccaacacactccacccagcacaccctcaaacaccctccgtagagcccgggccctgcccgcggctccggagccagctccatggcgtggacctggtggtggcagaggaggcgccgaaggtggccgtggagaaggagaaggtggagaagactacgcacaagaagacctagacgccttgttcgacgccgtcgcaagagatacagagttatcagaaacccttgtaaaacagaaggacacgatctccctcacaccagtagactccatcgcgacttacaagttgttgacccacacaccgtgggcccccaatgggcgctccacacctgggactggcgacgtggactctttggttcagaggctatcaaaagagtgtctgaacaacaagtacatgatgaactgtattacccaccttcaaagaaacctcgattcctccctccaatatcaggcctccaagagcaagaaagagactacagttcgcaggaggagaaagaacagtcctcctcagaagaagagacggacccgaagaaaaaagagcaaaaacagcagcagcgactccacctccagttccaagagcagcagcgactcggaaaccaactccgactcatcttccgagagctacagaaaacccaagcgggtctccacttaa

SEQ ID NO: 660 - DNA, 528 bp, Torque teno virus
  source 1..528: mol_type = other DNA
atggcgtggtcgtggtggtggaggcgaaggaaacgctggtggccgcgcagaaggaggcgatggagaaggctacgaacccgaagaactggaagagctgttccgcgccgccgccgccgacgacgagtaaggaggcgccggtgggggaggcgaccgcgtaggagacgggtgtactataagagacgcagacgaaagactggcagactgtatagaaagcctaaaaaaaaactagtactgactcaatggcaccccactacagttagaaactgctccatacggggcttagtgcccctagtcctctgcggacacacacagggaggcagaaactttgctttgaggagcgatgactaccccaaacaaggcaccccatacgggggcagcttcagcactacaacctggaacctcagggtgcttttcgacgagcaccaaaaacaccacaatacgtggagctatccaagcaatcaactagacctagccagatttagaggcagcatattttactttacagagacaaaaaaactgactacatag

SEQ ID NO: 661 - DNA, 783 bp, Torque teno virus
  source 1..783: mol_type = other DNA
atgagctggtgtactccagttgaaaatgcctataagagagagatccactttctcaggggctgtcaactgcttcacactagcttttgtggttgcgatgattttattaatcatattattcgcctacaaaatcttcacggcaacctacaccagcccacgggaccgtccacacctccagtgacccgtagagctctggccttgccggctgctccggagtcatggcgttccggtggtggtggtggagacgccgcccgcagcgacgatggacccggcgccgatggaggagactacgaacccgccgacctagacgcactgtacgacgccgtcgccgcagaccaagaattatcaaaaacccgtgtaaaaaagaagaatccacattcacctatcccagtagagagcctcgcgacctacaagttgttgacccactcaccatgggcccagaatgggtcttccacacatgggactggagacgtggactttttggtaaaaatgctgtcgacagagtgtcaaaaaaaccagacgatgatgcagaatattatccagtaccaaaaaggcctcgattcttccctccaacagacacacagtcagagccagaaaaagacttcggtttcacaccggagagccaagagttacagcaagaagacttacgagcaccccaagaagaaagccaagaggtacagcagcagcgactgctccagctcagactctcacagcagttcagactcagacagcagctccagcacctgttcgtacaagtcctcaaaacccaagcaggtctccacataa

SEQ ID NO: 662 - DNA, 783 bp, Torque teno virus
  source 1..783: mol_type = other DNA
atgagctttgtagaaccgttactaagcagcacccaccgagagatagcattctaccatggctgtgttcaaatgcacaaggccttctgtggctgtgacaactttcttacccacctgcagcgcataacaacatacatctctgctaatcaacacactccacccagcacaccctcaaacaccctccgtagagcccgggccctgcccgcggctccggagccagctccatggcgtggacctggtggtggcagaggaggcgccgaaggtggccgtggagaaggagaaggtggagaagactacgcaccagaagacctagacgacttgttcgccgccgtcgcaagagatacagagttatcagaaacccttgtaaaacagaaggacacgatctccctcacaccagtagactccatcgcgacttacaagttgttgacccacacaccgtgggcccccaatgggcgctccacacctgggactggcgacgtggactctttggttcagaggctatcaaaagagtgtctgaacaacaagtacatgatgaactgtattacccagcttcaaagaaacctcgattcctccctccaatatcaggcctccaagagcaagaaagagactacagttcgcaggaggaaaaagaccagtcctcctcagaagaagagaaggacccgaagaaaaaagagcaaaaacagcagcagcgactccacctccagttccaagagcagcagcgactcggaaaccaactccgactcatcttccgagagctacagaaaacccaagcgggtctccacataa

SEQ ID NO: 663 - DNA, 843 bp, Torque teno virus
  source 1..843: mol_type = other DNA
atgagtctgtggcgacccccggtccacaatgcccccggcagagagagactttggtttcaggcctgttacgaatctcacagtgctttttgtggctgtggtagctttattcttcatcttactagcttggctgcacgttttaattttcaggccgggccaccgcctcccgggggtccccgggcggagaccccgccgattctgagggcgctgccggcaccccagccgcgccgccaccgccagacggagaaccccgggtctgagccatggcctggagatggtggtggagacggcgctggaagccaagaaggcggccagcgtggaccaagtaccgcagacgcaggtggagacgacttcgaccccgcagacctagaagacttgctcgcggccgtcgaagaagacgaacagtcatcaaagacccgtgcagctcctcaggactggcacctaccgactccagtagattcaagcgggatgtacaagtcgttagcccgctcacaatggggccccgactgctattccactcgttcgaccaaagacgagggttctttactccaggagctatcaaacgaatgcatgatgaacaaattaatgttccagactttacacaaaaacctaaaatcccgcgaattttcccaccagtcgagctccgagaaagagcagaagccgaagaagactcaggttcggaaaaagcgtcgttcacctcgtcgcaagagagagaagccgaagcccaagaaaagttaccgatacagctccagctcagacagcagctcagacaacaacagcagctccgagtccacttgcagcaagtcttcctccaactccaaaaaacgaaggcacatttacatataa

SEQ ID NO: 664 - DNA, 822 bp, Torque teno virus
  source 1..822: mol_type = other DNA
atgaatctctggcgaccccctctgagaaatatcccccacagggagagatgttggcttgaggcctgtctcagagcccacgattctttttgtggctgtcctagtcctattgttcatttttctagtctggttgcacgttttaatctacaaggaggcccgccgccagaggatgactccccacagggcgcgccagtcctgagggccctgccggcaccgagcccccacaggcacacccgcacggagaacccctccggtgagccatggcctactcctactggtggcgccgccggaggtggccgtggagaggccgatggaggcgctggaggcgccgcagacgaataccgcgccgaagacctagacgacctgttcgccgctatcgaaggagaccaacgatcagaaacccgtgcacctcggacggacagacgcccacaaccagtagacagtctagagaggtacaaatcgttgacccgctcaccatgggaccccgatacgtattccactcgtgggactggcgacgtgggtggcttaatgacagaactctcaaacgcttgttccaaaaaccgctcgattttgaagagtatccaaaatctccaaagagacctagaattttcccacccacagagcagctccaagaagacccgcaagagcaagaaagagactcctcttcttcggaagaaagtctccctacatcgtcagaagagacaccgccagcccacctactcagagtacacctcagaaagcagctccggcaacagcgagacctccgagtccagctcagagccctgttcgcccaagtcctcaaaacgcaagcgggcctacacataa

SEQ ID NO: 665 - DNA, 837 bp, Torque teno virus
  source 1..837: mol_type = other DNA
atgccgtggagaccgccggctcataacgtccaggggcgagagagccagtggttcgcggcttgttttcacggccacgcttcgttttgcggctgcggtgactttattgggcatattaacagccttgctcctcgctttcctaacaaccaaggacccccgcatccacctgccttaaacaggccacctgcacagggcccagaaagccccgggggttccatactacccctgccagccctaccggcaccacctgatccgccaccacggcctggtggtggggaagacggtggcgacgccgcccgtggggccgctggcgccgccgaaggcgcgtatggagaagaagacctagaactgctgttcgccgccgccgaggaagacgatatgcaatcgacgacccctgccagcagggaacccacccgcttcccgagcccggtacgttgcctagaatcttacaagtcagcgacccgacgcaactcggaccgaaaaccatattccacctctgggaccagaggcgtggactttttagcaaaagaagtattgaaagaatgtcagaatacaaaggaactgatgacttattttcaccaggtcgcccaaagcgcccaaagctcgacacacgtcccgaaggactaccagaggagcaaagaggagcttacaatttactccaagccctcgaagactcagcccagtcggaagaaagcgaccaagaagaaatgcctcccctcgaagaagaacaagtactccacgagcaaaagaaagaggcgctcctccagcagctccagcagcagaaacaccaccagcgagtcctcaagcgaggcctcagactcctcctcggagacgtcctga

SEQ ID NO: 666 - DNA, 888 bp, Torque teno virus
  source 1..888: mol_type = other DNA
atgccgtggagaccgccggtgcatagtgtccaggggcgagaggatcagtggttcgcgagcttttttcacggccacgcttcattttgcggttgcggtgacgctgttggccatcttaatagcattgctcctcgctttcctcgcgccggtccaccaaggccccctccggggctagagcagcctaaccccccgcagcagggcccggccgggcccggagggccgcccgccatcttggcgctgccggctccgcccgcggagcctgacgacccgcagccacggcgtggtggtggggacggtggcgccgccgctggcgccgcaggcgaccgtggagaccgagactacgacgaagaagagctagacgagcttttccgcgccgccgccgaagacgatttggaacccacccgattcccgaccccgataagcaccctcgcctcctacaagtgtcgaacccgaaactgctcggaccgaggacagtgttccacaagtgggacatcagacgtgggcagtttagcaaaagaagtattaaaagagtgtcagaatactcatcggatgatgaatctcttgcgccaggtctcccatcaaagcgaaacaagctcgactcggccttcagaggagaaaacccagagcaaaaagaatgctattctctcctcaaagcactcgaggaagaagagaccccagaagaagaagaaccagcaccccaagaaaaagcccagaaagaggagctactccaccagctccagctccagagacgccaccagcgagtcctcagacgagggctcaagctcgtctttacagacatcctccgactccgccagggagtccactggaaccccgagctcacatagagcccccaccttacataccagacctactttttcccaatactggtaa

SEQ ID NO: 667 - DNA, 870 bp, Torque teno virus
  source 1..870: mol_type = other DNA
atgccgtggtctctgccgagacataatatcagaacgagagaagatctctgggtgcaatcgattctttattcacatgacactttttgtggctgtgataatattcctgagcatcttactggcctcctgggcggcgtacgaccagctccacctagaaacccaggaccccctaccatacggagcctgccggcactgccgccagctccggaaccccctgaggaaccacggcgtggtggagatacagacggagaccgtggagaagatggaggagacgccgctggggcctacgaacccgaagacctagaagaacttttcgccgccgccgagcaagacgatatcccattgacgacccctgccaaaaaggaaaacacgacattcccgaccccgatacaaaccctccaagaatacaaatatcagacccgcaacacctcggaccggcgacgctgttccactcgtgggacctcagacgtggatatattaatacaaaaagtattaaaagaatctcagaacacctcgatgctaatgaatatttttcgacaggcgtcgtgtccaaaaaaccccgattcgacactccccaccacgggcagctatcaaaccaagaagaagacgccttgtctatcctcagacaaccccaaaaagagcaagaagagaccacctccgaggaagaacaagcactccaaaaagaagaggagcaaaaagaaaagctcctacagcaactcagagtccagcgacagcaccagcgagtcctcagacagggaatcaaacacctcatgggagacgtcctccgactcagacagggagtccactggaacccagtcctataatacttccaccagaaccaataccagacctcttattccccaatactggtaa

SEQ ID NO: 668 - DNA, 876 bp, Torque teno virus
  source 1..876: mol_type = other DNA
atgtcgtggagaccgccgagccaaaatttactgcaaagagaagaggcctggtactcagcttttcttagctcgcattctacattttgcggttgtactgaccctctgctgcatattactctcattgctggccgccttactaaccccgtacccgtcacccgccaaccggagacccctcctaacggcctcagggggctgccggcactgccagcaccccctgaaccaccagcaccgccaccacggcctggggatggtaccggagaagaagatggcgcccatggagaaggagaaggtgggcgatacgcagaagaagacctagaagaactgttcgccgccgcggcagaagacgatatcctatcgacgacccctaccaaaaacccacccacgaaatacccgaccccgataagcaccctccaagactacaaattgcagacccgaaaatcctcggaccgtcgacagtcttccacacatgggacatcagacgtggcctctttagcacagcaagtcttaagagagtgtcagaataccaaccgcctgatgaccttttttcaacaggcgtcgcatccaaaagaccccgattcgacactccagtccaagggcagctcgaaagccaagaagaagaaagctatcgtttactcagagcactccaaaaagagcaagagacaagcagctcggaagaggagcagccacaaaaccaagagatccaagaaaaactactcctccagctccagcagcagcgacaacagcagcgactcctcgcaaagggaatcaagcacctcctcggagatgtcctccgactccgaaaaggagtccactgggacccggtccttacatagcacctccagaacctatcccagaccttttgttccccagtactaa

SEQ ID NO: 669 - DNA, 834 bp, Torque teno virus
  source 1..834: mol_type = other DNA
atgtcgtgggctccgccgctattcaactcgaaacagagagaggaccagtggtaccagtcaattattttcagccataatactttttgcggctgcggtgaccttgttaggcatttttgcgtcgttgcttctcgctttactgagcctcctgtagtgccggccctaccggcaccggtaccggcaccgccacggcgtggtacagaagaagaaggtggagaccgtggagaagacgccgcagaccgtggaccctacgcagaagaagagctagaagatttgttcgccgccgcccgagaagacgatatcccatcgacgacccctgccaaaaagacacccacgaaatacccgaccccgataaacaccctagaggaatacaaatatcagacccgaaggtactcggaccacccacagtcttccacacatgggacatcagacgtggactgtttagctcgacgagtcttaaaagagtgtcagaataccaaccgcctgatgaccctttttcaacaggcgtcgtcttcaaaagaccccgactggaaacccagtacaaaggaacccaagaaaccccagaagaagacgcctacactttactcaaagcactccaaaaagagcaagagagcagcagctcggaagaagaactcccacaagaagagcaagagatccaaaaaacacaactcctcaagcagctccaactccagcagcagcaacagcgaatcctcaagaggggaatcagacacctcttcggagacgtcctccgactcagaaaaggagtccactccaacccagacctattataataccagcagaggaaatcccagacctgcttttccccaatactggtaa

SEQ ID NO: 670 - DNA, 873 bp, Torque teno virus
  source 1..873: mol_type = other DNA
atgccgtggcatccaccgggctacaacgttcaacagagagaagagctctgggtacagacagttactacttcacatgctactttttgcggctgtggtgaccctagtagccatcttcaccgcattcttagccgccttaataacagcagccggcggccccccgaaaccccaaaccccattcgtgccctaccggccctaccggcaccccaagaacctgaacagccgccatcacggcctggtaccggtacagaagaaggccatggcgccgaaggaggcgaccgaggtggggcctacgcagaagaagatttagaagatcttttcgcggccgcggaagaagacgatatcccatcgacgacccatgccaaaagcccacccacgaccttcccgaccccgatagacaccccccaagaatacaaatctcggacccggcaagactcggaccggagacgctcttccactcatgggacatcagacgtggatacattaacacaaaagctattaaaagaatctcagattacacagaatctaatgactatttttcaacaggcgtcgtgtcaaaaagaccccgattggaaacccagtaccacggccaacacgaaagccaagaagaagacgcctatcttttactcaaacaactccaggaagagcaagaaacgagcagttcggagggagaacaagcaccccaagaaaaaacactccaaaaagaaaagctcctcaagcagctgcagctccacaagcagcagcagcaactcctcagaaaaggaatcagacacctcctcggggacgtcctccgactcagacggggagtccactgggacccaggcctatagtactgcctccagagcctattccagacttgcttttcccaaatactaa

SEQ ID NO: 671 - DNA, 909 bp, Torque teno virus
  source 1..909: mol_type = other DNA
atgtcgtggcgaccgccgttgcattctatccaaggcagagaagatcaatggtatgcaggcatctttcatacgcattttgctttttgcggttgtggtgaccctgttgggcgtattaaccgcattgctcaccgctttcctaacgccggtcccccgagaccacctccagggctagaccagcccaacctcggagggccggaaggtccaggaggtgcccctagagccctgccagccctgccggccccggcagagccagagccggcaccacggcgtggtggtggggccgatggagacagcgccgctggggccgccgccgccgcagaccatggagggtacgacgaaggagacctagaagatcttttcgccgccgccgccgaggacgatatgcaatcgacgacccctgccagaagcccacccatgagctacccgatcccgatagacaccctcgcatgttacaagtctctgacccgacaaagctcggaccgaagacagtgttccacaaatgggactggagacgtgggcaacttagcaaaagaagtattaaaagagtccaagaagactcaacggatgatgaatatgttacagggcctttatcaagaaaaagaaacaagctcgacacaaagatgccaggccccccaacccccgaaaaagaaagctacactttactccaagccctccaagagtcgggccaggagagcagctcccaggacgaagaacaagcaccccaaaaagaagagaaccagaaagaagcgctcgtggagcagctccagctccagaaacagcaccagcgagtcctcaagcgaggcctcaaactcctcttgggagacgtcctccgactccgccgcggagtccactgggaccccctcctatcctaattcagggtccctctatcccagacctgcttttccctaa

SEQ ID NO: 672 - DNA, 819 bp, Torque teno virus
  source 1..819: mol_type = other DNA
atgagtatttggaggcctccactgcacaatgtcccgggactcgaacacctctggtacgagtcagtgcatcgtagccatgctgctgtttgtggctgtggggatcctgtacgccatcttactgctcttgctgaaagatatggcattccgggagggtcgcggtcttctggggcaccgggagtagggggcaaccacaaccctccccagatccgtcgagcccgccacccggcggctgctccggaccccccagcaggtaaccagcctccggccctgccatggcatggggatggtggaaacgaaagcggcgctggtggtggagaaagcggtggacccgtggccgacttcgcagacgatggcctagacgatctcgtcgccgccctcgacgaagaagaattgttaaagacccctgcacccagcccacctttgaaatacccggtggcggtaacatccctcgcagaatacaagtcatcaatccgaaagtcctcggacccagctacagtttcagatcctttgacctcagacgtgacatgtttagcggctcgagtcttaaaagagtctcagaacaacaagagacttctgagtttttattctccggcggcaaacgccccaggatcgaccttcccaagtacgtcccgccagaagaagacttcaatatccaagagagacaacaaagagaacagagaccgtggacgagcgaaagcgagagcgaagcagaagcccaagaagagacgcaggcgggctcggtccgagagcagctccagcagcagctccaagagcagtttcaactccgaagagggctcaagtgcctcttcgagcagttag

SEQ ID NO: 673 - DNA, 819 bp, Torque teno virus
  source 1..819: mol_type = other DNA
atgagcttctggagacctccggtgcacaatgccacggggatccagcgcctgtggtacgagtcctttcaccgtggccatgctgctttttgtggttgtggggatcctatacttcacattactgcacttgctgagacatatggccatccaacaggcccgagaccttctgggccaccgcgagtagaccccgatccccagatccgtagagccaggcctgccccggccgctccggagccctcacaggttgagccgagacctgccctgccatggcatggggatggtggaagcgacggcggcgctggtggttccggaagcggtggacccgtggcagacttcgcagacgatggcctcgatcagctcgtcgccgccctagacgacgaagaattgtacaagatccctgcacacagtccacctatgacatccccggcaccggtaacttgcctcgcagaatacaagtcattgacccgaaagtcctcggtccccactactcattccaccgctgggacttcaggcgtggcctctttggccaacaagctattaagagagtgtcagaacaaccaacaacttctgagtttttattctcaggtccaaagagacccagaatcgatcaagggccttacatcccgccagaaaaaggctcagattcactccaaagagaatcgagaccgtggagcaactcggagaccgaggcagagacagaagccccctcggaagaagagccggagaaccaagaagaacaagtactccagttgcagctccgacagcagctccgagaacagcgaaaactcagacagggaatccagtgcctcttcgagcaactga

SEQ ID NO: 674 - DNA, 318 bp, Torque teno virus
  source 1..318: mol_type = other DNA
atgctatccagagagtgtcacaaaaaccggaagatgctctccgctttacaaaccctttcaagagacccagatatcttcccccgacagacggagaagactaccgacaagaagaagacttcgctttacaggaaagaagacggcgcacatccacagaagaagtccaggacgaggagagccccccgcaaaacgcgccgctcctacagcagcagcagcagcagcgggagctctcagtccagcacgcggagcagcagcgactcggagtccaactccgatacatcctccaagaagtcctcaaaacgcaagcgggtctccacctaa

SEQ ID NO: 675 - DNA, 750 bp, Torque teno virus
  source 1..750: mol_type = other DNA
atgagctttgtagaacccttactaaccagcacccacagagagatagcatactaccatggctgtgttcagatgcacaaagccttctgtgggtgtgacaactttcttacccacctgcaacgcataacaacatacatctctgctaaccaacacactccacccagcacaccctcaaacaccctccgtagagcccgggccctgcccgcggctccggagccagctccatggcgtggacctggtggtggcagaggaggcgccgaaggtggccgtggagaaggagaaggtggagaagactacgcacaagaagacctagacgccttgttcgacgccgtcgcaagagatacagagcctccaagagcaagaaagagactacagttcgcaggaggagaaagaacagtcctcctcagaagaagagacggacccgaagaaaaaagagcaaaaacagcagcagcgactccacctccagttccaagagcagcagcgactcggaaaccaactccgactcatcttccgagagctacagaaaacccaagcgggtctccacttaaatcctatgttatcaaaccggctgtaaataaagtttacctttttcctcccgaggggcctaaacccatctctggctacagagcatgggaagacgaatttaccacctgtaagtactgggacaggcctagtagaattaaccacacagacccccccttttacccctggatgcctaaatacaatgtaaccttcaaacttggctggaaataa

SEQ ID NO: 676 - DNA, 765 bp, Torque teno virus
  source 1..765: mol_type = other DNA
atgagctggtgtactccagttgaaaatgcctataagagagagatccactttctcaggggctgtcaactgcttcacactagcttttgtggttgcgatgattttattaatcatattattcgcctacaaaatcttcacggcaacctacaccagcccacgggaccgtccacacctccagtgacccgtagagctctggccttgccggctgctccggagtcatggcgttccggtggtggtggtggagacgccgcccgcagcgacgatggacccggcgccgatggaggagactacgaacccgccgacctagacgcactgtacgacgccgtcgccgcagaccaagaacacacagtcagagccagaaaaagacttcggtttcacaccggagagccaagagttacagcaagaagacttacgagcaccccaagaagaaagccaagaggtacagcagcagcgactgctccagctcagactctcacagcagttcagactcagacagcagctccagcacctgttcgtacaagtcctcaaaacccaagcaggtctccacataaacccattatttttaaaccatgcataaatcaggtctttatgtttccaccagacacccccagacctattataactaaagaaggctgggaggatgagtttgtcacctgcaaacactgggataggccagctagatcatactacacagacacacctacttacccttggatgcccaaggcaccccctcaatgcaatgtaagctttaaacttggctttaaataa

SEQ ID NO: 677 - DNA, 750 bp, Torque teno virus
  source 1..750: mol_type = other DNA
atgagctttgtagaaccgttactaagcagcacccaccgagagatagcattctaccatggctgtgttcaaatgcacaaggccttctgtggctgtgacaactttcttacccacctgcagcgcataacaacatacatctctgctaatcaacacactccacccagcacaccctcaaacaccctccgtagagcccgggccctgcccgcggctccggagccagctccatggcgtggacctggtggtggcagaggaggcgccgaaggtggccgtggagaaggagaaggtggagaagactacgcaccagaagacctagacgacttgttcgccgccgtcgcaagagatacagagcctccaagagcaagaaagagactacagttcgcaggaggaaaaagaccagtcctcctcagaagaagagaaggacccgaagaaaaaagagcaaaaacagcagcagcgactccacctccagttccaagagcagcagcgactcggaaaccaactccgactcatcttccgagagctacagaaaacccaagcgggtctccacataaatcctatgttatcaaaccggctataaataaagtttacctttttcctcccgaggggcctaaacccatctctggctacagagcatgggaagatgagttcacctgctgtaagtactgggacaggcctagtagaattaaccacacagacccccccttctacccctggatgcctaagtacaatgtaacctttaaacttggctggaaataa

SEQ ID NO: 678 - DNA, 822 bp, Torque teno virus
  source 1..822: mol_type = other DNA
atgagtctgtggcgacccccggtccacaatgcccccggcagagagagactttggtttcaggcctgttacgaatctcacagtgctttttgtggctgtggtagctttattcttcatcttactagcttggctgcacgttttaattttcaggccgggccaccgcctcccgggggtccccgggcggagaccccgccgattctgagggcgctgccggcaccccagccgcgccgccaccgccagacggagaaccccgggtctgagccatggcctggagatggtggtggagacggcgctggaagccaagaaggcggccagcgtggaccaagtaccgcagacgcaggtggagacgacttcgaccccgcagacctagaagacttgctcgcggccgtcgaagaagacgaacatcgagctccgagaaagagcagaagccgaagaagactcaggttcggaaaaagcgtcgttcacctcgtcgcaagagagagaagccgaagcccaagaaaagttaccgatacagctccagctcagacagcagctcagacaacaacagcagctccgagtccacttgcagcaagtcttcctccaactccaaaaaacgaaggcacatttacatataaacccactatttttggcccaagggaacatgtaaacatgttcggtgagtacccagataggaagcccactaaggaagattggcagaccgagtatgagacctgcagagcctttgatagaccccctagaaccttactcacagatccccctttctacccctggatgcctaaacaaccccccacctatcgtgtatccttcaaacttggctttcaataa

SEQ ID NO: 679 - DNA, 807 bp, Torque teno virus
  source 1..807: mol_type = other DNA
atgaatctctggcgaccccctctgagaaatatcccccacagggagagatgttggcttgaggcctgtctcagagcccacgattctttttgtggctgtcctagtcctattgttcatttttctagtctggttgcacgttttaatctacaaggaggcccgccgccagaggatgactccccacagggcgcgccagtcctgagggccctgccggcaccgagcccccacaggcacacccgcacggagaacccctccggtgagccatggcctactcctactggtggcgccgccggaggtggccgtggagaggccgatggaggcgctggaggcgccgcagacgaataccgcgccgaagacctagacgacctgttcgccgctatcgaaggagaccaagcagctccaagaagacccgcaagagcaagaaagagactcctcttcttcggaagaaagtctccctacatcgtcagaagagacaccgccagcccacctactcagagtacacctcagaaagcagctccggcaacagcgagacctccgagtccagctcagagccctgttcgcccaagtcctcaaaacgcaagcgggcctacacataaaccccctcttattggccccgcagtaaacaaggtctacttgttccctgacagggcccctaaacctccacctagctcgggagactgggccacggagtacgcggcggccgccgccttcgatagaccccccagaggcaacctgtcagacaaccccttctatccctggatgccaacaaacaccaaattctctgtaacctttaaactggggtggaaaccctga

SEQ ID NO: 680 - DNA, 894 bp, Torque teno virus
  source 1..894: mol_type = other DNA
atgccgtggagaccgccggctcataacgtccaggggcgagagagccagtggttcgcggcttgttttcacggccacgcttcgttttgcggctgcggtgactttattgggcatattaacagccttgctcctcgctttcctaacaaccaaggacccccgcatccacctgccttaaacaggccacctgcacagggcccagaaagccccgggggttccatactacccctgccagccctaccggcaccacctgatccgccaccacggcctggtggtggggaagacggtggcgacgccgcccgtggggccgctggcgccgccgaaggcgcgtatggagaagaagacctagaactgctgttcgccgccgccgaggaagacgatatgtcgcccaaagcgcccaaagctcgacacacgtcccgaaggactaccagaggagcaaagaggagcttacaatttactccaagccctcgaagactcagcccagtcggaagaaagcgaccaagaagaaatgcctcccctcgaagaagaacaagtactccacgagcaaaagaaagaggcgctcctccagcagctccagcagcagaaacaccaccagcgagtcctcaagcgaggcctcagactcctcctcggagacgtcctgaaactccgccggggtctacacatagacccggtccttacatagcaccccctccatacatccctgaccttctttttcccaacacccaaaaaaaaaaaaaattttccaacttcgattgggctacagaataccagcttgctaccgctttcgaccgccctctccgccactaccccttagacctcccgcactacccgtggctaccaaaaaagcccaatacccactctacctatagagtgtcctttcaactaaaagccccccaataa

SEQ ID NO: 681 - DNA, 882 bp, Torque teno virus
  source 1..882: mol_type = other DNA
atgccgtggagaccgccggtgcatagtgtccaggggcgagaggatcagtggttcgcgagcttttttcacggccacgcttcattttgcggttgcggtgacgctgttggccatcttaatagcattgctcctcgctttcctcgcgccggtccaccaaggccccctccggggctagagcagcctaaccccccgcagcagggcccggccgggcccggagggccgcccgccatcttggcgctgccggctccgcccgcggagcctgacgacccgcagccacggcgtggtggtggggacggtggcgccgccgctggcgccgcaggcgaccgtggagaccgagactacgacgaagaagagctagacgagcttttccgcgccgccgccgaagacgatttgtctcccatcaaagcgaaacaagctcgactcggccttcagaggagaaaacccagagcaaaaagaatgctattctctcctcaaagcactcgaggaagaagagaccccagaagaagaagaaccagcaccccaagaaaaagcccagaaagaggagctactccaccagctccagctccagagacgccaccagcgagtcctcagacgagggctcaagctcgtctttacagacatcctccgactccgccagggagtccactggaaccccgagctcacatagagcccccaccttacataccagacctactttttcccaatactggtaaaaaaaaaaaattctctcccttcgactgggaaacggaggcccagctagcagggatattcaagcgtcctatgcgcttctatccctcagacacccctcactacccgtggttaccccccaagcgcgatatcccgaaaatatgtaacataaacttcaaaataaagctgcaagagtga

SEQ ID NO: 682 - DNA, 840 bp, Torque teno virus
  source 1..840: mol_type = other DNA
atgccgtggtctctgccgagacataatatcagaacgagagaagatctctgggtgcaatcgattctttattcacatgacactttttgtggctgtgataatattcctgagcatcttactggcctcctgggcggcgtacgaccagctccacctagaaacccaggaccccctaccatacggagcctgccggcactgccgccagctccggaaccccctgaggaaccacggcgtggtggagatacagacggagaccgtggagaagatggaggagacgccgctggggcctacgaacccgaagacctagaagaacttttcgccgccgccgagcaagacgatatgcgtcgtgtccaaaaaaccccgattcgacactccccaccacgggcagctatcaaaccaagaagaagacgccttgtctatcctcagacaaccccaaaaagagcaagaagagaccacctccgaggaagaacaagcactccaaaaagaagaggagcaaaaagaaaagctcctacagcaactcagagtccagcgacagcaccagcgagtcctcagacagggaatcaaacacctcatgggagacgtcctccgactcagacagggagtccactggaacccagtcctataatacttccaccagaaccaataccagacctcttattccccaatactggtaaaaaaaaaaaattctctctcttcgactgggagtgcgagagggatctagcatgtgcattctgccgtcccatgcgcttctatccctcagacaacccaacttacccgtggttaccccccaagcgagatatccccaaaatatgtaaagtaaacttcaaaataaatttcactgaatga

SEQ ID NO: 683 - DNA, 849 bp, Torque teno virus
  source 1..849: mol_type = other DNA
atgtcgtggagaccgccgagccaaaatttactgcaaagagaagaggcctggtactcagcttttcttagctcgcattctacattttgcggttgtactgaccctctgctgcatattactctcattgctggccgccttactaaccccgtacccgtcacccgccaaccggagacccctcctaacggcctcagggggctgccggcactgccagcaccccctgaaccaccagcaccgccaccacggcctggggatggtaccggagaagaagatggcgcccatggagaaggagaaggtgggcgatacgcagaagaagacctagaagaactgttcgccgccgcggcagaagacgatatgcgtcgcatccaaaagaccccgattcgacactccagtccaagggcagctcgaaagccaagaagaagaaagctatcgtttactcagagcactccaaaaagagcaagagacaagcagctcggaagaggagcagccacaaaaccaagagatccaagaaaaactactcctccagctccagcagcagcgacaacagcagcgactcctcgcaaagggaatcaagcacctcctcggagatgtcctccgactccgaaaaggagtccactgggacccggtccttacatagcacctccagaacctatcccagaccttttgttccccagtactaaaaaaaaaaagaaattttcaaaattagactgggagaacgaggctcaaatagcagggtggttagacaggcctatgaggctgtatcctggggacccccccttctacccttggctaccccgaaagccacctacccagcctacatgtagggtaagcttcaaaataaagctagatgattaa

SEQ ID NO: 684 - DNA, 804 bp, Torque teno virus
  source 1..804: mol_type = other DNA
atgtcgtgggctccgccgctattcaactcgaaacagagagaggaccagtggtaccagtcaattattttcagccataatactttttgcggctgcggtgaccttgttaggcatttttgcgtcgttgcttctcgctttactgagcctcctgtagtgccggccctaccggcaccggtaccggcaccgccacggcgtggtacagaagaagaaggtggagaccgtggagaagacgccgcagaccgtggaccctacgcagaagaagagctagaagatttgttcgccgccgcccgagaagacgatatgcgtcgtcttcaaaagaccccgactggaaacccagtacaaaggaacccaagaaaccccagaagaagacgcctacactttactcaaagcactccaaaaagagcaagagagcagcagctcggaagaagaactcccacaagaagagcaagagatccaaaaaacacaactcctcaagcagctccaactccagcagcagcaacagcgaatcctcaagaggggaatcagacacctcttcggagacgtcctccgactcagaaaaggagtccactccaacccagacctattataataccagcagaggaaatcccagacctgcttttccccaatactggtaaaaaaaaaaaattctctccattcgattgggagacagagcagcagctcgcatgctggatgcggcgccccatgcgcttctatccaacagaccccccgttctacccctggctaccccccaagcgagatatccccaatatatgtaaagtcaacttcaaaataaattactcagagtaa

SEQ ID NO: 685 - DNA, 846 bp, Torque teno virus
  source 1..846: mol_type = other DNA
atgccgtggcatccaccgggctacaacgttcaacagagagaagagctctgggtacagacagttactacttcacatgctactttttgcggctgtggtgaccctagtagccatcttcaccgcattcttagccgccttaataacagcagccggcggccccccgaaaccccaaaccccattcgtgccctaccggccctaccggcaccccaagaacctgaacagccgccatcacggcctggtaccggtacagaagaaggccatggcgccgaaggaggcgaccgaggtggggcctacgcagaagaagatttagaagatcttttcgcggccgcggaagaagacgatatgcgtcgtgtcaaaaagaccccgattggaaacccagtaccacggccaacacgaaagccaagaagaagacgcctatcttttactcaaacaactccaggaagagcaagaaacgagcagttcggagggagaacaagcaccccaagaaaaaacactccaaaaagaaaagctcctcaagcagctgcagctccacaagcagcagcagcaactcctcagaaaaggaatcagacacctcctcggggacgtcctccgactcagacggggagtccactgggacccaggcctatagtactgcctccagagcctattccagacttgcttttcccaaatactaaaaaaaaaaagaaattttcgcccttagactgggagaacgaggctcaaatagcagggtggttagacaggcctatgaggctgtatcctggggacaaccccttctacccgtggctaccaaaaaagccacctacccaccctacatgtagagtaaccttcaaaataaagctagatgattaa

SEQ ID NO: 686 - DNA, 891 bp, Torque teno virus
  source 1..891: mol_type = other DNA
atgtcgtggcgaccgccgttgcattctatccaaggcagagaagatcaatggtatgcaggcatctttcatacgcattttgctttttgcggttgtggtgaccctgttgggcgtattaaccgcattgctcaccgctttcctaacgccggtcccccgagaccacctccagggctagaccagcccaacctcggagggccggaaggtccaggaggtgcccctagagccctgccagccctgccggccccggcagagccagagccggcaccacggcgtggtggtggggccgatggagacagcgccgctggggccgccgccgccgcagaccatggagggtacgacgaaggagacctagaagatcttttcgccgccgccgccgaggacgatatggcctttatcaagaaaaagaaacaagctcgacacaaagatgccaggccccccaacccccgaaaaagaaagctacactttactccaagccctccaagagtcgggccaggagagcagctcccaggacgaagaacaagcaccccaaaaagaagagaaccagaaagaagcgctcgtggagcagctccagctccagaaacagcaccagcgagtcctcaagcgaggcctcaaactcctcttgggagacgtcctccgactccgccgcggagtccactgggaccccctcctatcctaattcagggtccctctatcccagacctgcttttccctaacactcaaaaaaaacccaaattttccaacttcgactgggccaccgagtaccaaatagccaagtggccagaccgccctttgaggcactacccctcagacctccctcactacccgtggctaccaaaaaagccacctacccagcctacatgtagagtaagtttcaaattaaagcttgatgcctaa

SEQ ID NO: 687 - DNA, 801 bp, Torque teno virus
  source 1..801: mol_type = other DNA
atgagtatttggaggcctccactgcacaatgtcccgggactcgaacacctctggtacgagtcagtgcatcgtagccatgctgctgtttgtggctgtggggatcctgtacgccatcttactgctcttgctgaaagatatggcattccgggagggtcgcggtcttctggggcaccgggagtagggggcaaccacaaccctccccagatccgtcgagcccgccacccggcggctgctccggaccccccagcaggtaaccagcctccggccctgccatggcatggggatggtggaaacgaaagcggcgctggtggtggagaaagcggtggacccgtggccgacttcgcagacgatggcctagacgatctcgtcgccgccctcgacgaagaagaaagaagacttcaatatccaagagagacaacaaagagaacagagaccgtggacgagcgaaagcgagagcgaagcagaagcccaagaagagacgcaggcgggctcggtccgagagcagctccagcagcagctccaagagcagtttcaactccgaagagggctcaagtgcctcttcgagcagttagtcagaacccaacagggagtccacgtagatccctgcctcgtgtaggcccggagcagtggctactccccgagagaaagcctaagcccgctcctacttcaggagactgggctatggagtacctaatgtgcaaaataatgaataggcctcctcgctctcagcttactgaccccccattttacccttactgcaaaaataattacaatgtaacctttcagcttaactacaaataa

SEQ ID NO: 688 - DNA, 801 bp, Torque teno virus
  source 1..801: mol_type = other DNA
atgagcttctggagacctccggtgcacaatgccacggggatccagcgcctgtggtacgagtcctttcaccgtggccatgctgctttttgtggttgtggggatcctatacttcacattactgcacttgctgagacatatggccatccaacaggcccgagaccttctgggccaccgcgagtagaccccgatccccagatccgtagagccaggcctgccccggccgctccggagccctcacaggttgagccgagacctgccctgccatggcatggggatggtggaagcgacggcggcgctggtggttccggaagcggtggacccgtggcagacttcgcagacgatggcctcgatcagctcgtcgccgccctagacgacgaagaaaaaaggctcagattcactccaaagagaatcgagaccgtggagcaactcggagaccgaggcagagacagaagccccctcggaagaagagccggagaaccaagaagaacaagtactccagttgcagctccgacagcagctccgagaacagcgaaaactcagacagggaatccagtgcctcttcgagcaactgataacaacccaacagggggttcacaaaaacccattgctagagtaggcccagagcagtggctgtttcccgagagaaagccaaaaccacctcccaccgcccaggactgggcggaggagtacactgcctgtaaatactggggtaggccacctcgcaaattcctcacagacacgccattctatactcactgcaagaccaattacaatgtaacctttatgcttaactatcaataa

SEQ ID NO: 689 - DNA, 516 bp, Torque teno virus
  source 1..516: mol_type = other DNA
atgggactggcgacgggggctttttggtgcagatgctatccagagagtgtcacaaaaaccggaagatgctctccgctttacaaaccctttcaagagacccagatatcttcccccgacagacggagaagactaccgacaagaagaagacttcgctttacaggaaagaagacggcgcacatccacagaagaagtccaggacgaggagagccccccgcaaaacgcgccgctcctacagcagcagcagcagcagcgggagctctcagtccagcacgcggagcagcagcgactcggagtccaactccgatacatcctccaagaagtcctcaaaacgcaagcgggtctccacctaaaccccctattattaggcccgccacaaacaaggtgtatatctttgagccccccagaggcctactccccatagtgggaaaagaagcctgggaggacgagtactgcacctgcaagtactgggatcgccctcccagaaccaaccacctagacacccccacttatccctag

SEQ ID NO: 690 - DNA, 22 bp, synthetic construct
  misc_feature 1..22: note = source = /note="Description of Artificial Sequence: Syntheticprimer"
  source 1..22: mol_type = other DNA
attcgaatggctgagtttatgc

SEQ ID NO: 691 - DNA, 24 bp, synthetic construct
  misc_feature 1..24: note = source = /note="Description of Artificial Sequence: Syntheticprimer"
  source 1..24: mol_type = other DNA
cacgaattagccaagactgggcac

SEQ ID NO: 692 - DNA, 20 bp, synthetic construct
  misc_feature 1..20: note = source = /note="Description of Artificial Sequence: Syntheticprimer"
  source 1..20: mol_type = other DNA
gctcccactcctgatttctg

SEQ ID NO: 693 - DNA, 21 bp, synthetic construct
  misc_feature 1..21: note = source = /note="Description of Artificial Sequence: Syntheticprimer"
  source 1..21: mol_type = other DNA
ccttgactacggtggtttcac

SEQ ID NO: 694 - DNA, 22 bp, synthetic construct
  misc_feature 1..22: note = source = /note="Description of Artificial Sequence: Syntheticprimer"
  source 1..22: mol_type = other DNA
tgcaggcattcgagggcttgtt

SEQ ID NO: 695 - DNA, 20 bp, synthetic construct
  misc_feature 1..20: note = source = /note="Description of Artificial Sequence: Syntheticprimer"
  source 1..20: mol_type = other DNA
tttaaccccctagtcccagg

SEQ ID NO: 696 - DNA, 56 bp, synthetic construct
  misc_feature 1..56: note = source = /note="Description of Artificial Sequence: Syntheticoligonucleotide"
  source 1..56: mol_type = other DNA
tttgtgacacaagatggccgacttccttcctctttagtcttccccaaagaagacaa

SEQ ID NO: 697 - DNA, 20 bp, synthetic construct
  misc_feature 1..20: note = source = /note="Description of Artificial Sequence: Syntheticprimer"
  source 1..20: mol_type = other DNA
gaagcccaccaaaagcaatt

SEQ ID NO: 698 - DNA, 21 bp, synthetic construct
  misc_feature 1..21: note = source = /note="Description of Artificial Sequence: Syntheticprimer"
  source 1..21: mol_type = other DNA
agttcccgtgtctatagtcga

SEQ ID NO: 699 - DNA, 22 bp, synthetic construct
  misc_feature 1..22: note = source = /note="Description of Artificial Sequence: Syntheticprobe"
  source 1..22: mol_type = other DNA
acttcgttacagagtccagggg

SEQ ID NO: 700 - DNA, 20 bp, synthetic construct
  misc_feature 1..20: note = source = /note="Description of Artificial Sequence: Syntheticprimer"
  source 1..20: mol_type = other DNA
agcaacaggtaatggaggac

SEQ ID NO: 701 - DNA, 20 bp, synthetic construct
  misc_feature 1..20: note = source = /note="Description of Artificial Sequence: Syntheticprimer"
  source 1..20: mol_type = other DNA
tggaagctggggtctttaac

SEQ ID NO: 702 - DNA, 22 bp, synthetic construct
  misc_feature 1..22: note = source = /note="Description of Artificial Sequence: Syntheticprobe"
  source 1..22: mol_type = other DNA
tctaccttaggtgcaaagggcc

SEQ ID NO: 703 - DNA, 71 bp, synthetic construct
  misc_feature 1..71: note = source = /note="Description of Artificial Sequence: Syntheticoligonucleotide"
  source 1..71: mol_type = other DNA
cgggtgccggaggtgagtttacacaccgcagtcaaggggcaattcgggctcgggactggccgggctwtggg

SEQ ID NO: 704 - DNA, 71 bp, synthetic construct
  misc_feature 1..71: note = source = /note="Description of Artificial Sequence: Syntheticoligonucleotide"
  source 1..71: mol_type = other DNA
cgggtgccgtaggtgagtttacacaccgcagtcaaggggcaattcgggctcgggactggccgggctatggg

SEQ ID NO: 705 - DNA, 71 bp, synthetic construct
  misc_feature 1..71: note = source = /note="Description of Artificial Sequence: Syntheticoligonucleotide"
  source 1..71: mol_type = other DNA
cgggtgccggaggtgagtttacacaccgcagtcaaggggcaattcgggctcgggactggccgggccctggg

SEQ ID NO: 706 - DNA, 71 bp, synthetic construct
  misc_feature 1..71: note = source = /note="Description of Artificial Sequence: Syntheticoligonucleotide"
  source 1..71: mol_type = other DNA
cgggtgccggaggtgagtttacacaccgcagtcaaggggcaattcgggctcgggactggccgggctttggg

SEQ ID NO: 707 - DNA, 71 bp, synthetic construct
  misc_feature 1..71: note = source = /note="Description of Artificial Sequence: Syntheticoligonucleotide"
  source 1..71: mol_type = other DNA
cgggtgccggaggtgagtttacacaccgcagtcaaggggcaattcgggctcgggactggccgggctatggg

SEQ ID NO: 708 - DNA, 71 bp, synthetic construct
  misc_feature 1..71: note = source = /note="Description of Artificial Sequence: Syntheticoligonucleotide"
  source 1..71: mol_type = other DNA
cgggtgccggaggtgagtttacacaccgaagtcaaggggcaattcgggctcaggactggccgggctttggg

SEQ ID NO: 709 - DNA, 169 bp, synthetic construct
  modified_base 20: mod_base = OTHER; note = a, c, t, g, unknown or other
  modified_base 22: mod_base = OTHER; note = a, c, t, g, unknown or other
  modified_base 40..42: mod_base = OTHER; note = a, c, t, g, unknown or other
  modified_base 53..56: mod_base = OTHER; note = a, c, t, g, unknown or other
  modified_base 62: mod_base = OTHER; note = a, c, t, g, unknown or other
  modified_base 64: mod_base = OTHER; note = a, c, t, g, unknown or other
  modified_base 97..98: mod_base = OTHER; note = a, c, t, g, unknown or other
  misc_feature 1..169: note = source = /note="Description of Artificial Sequence: Syntheticpolynucleotide"
  source 1..169: mol_type = other DNA
gccgccgcggcggcggsggngnsgcgcgctdcgcgcgcsnnncrccrgggggnnnncwgcsncncccccccccgcgcatgcgcgggkcccccccccnncggggggctccgccccccggcccccccccgtgctaaacccaccgcgcatgcgcgaccacgcccccgccgcc

SEQ ID NO: 710 - DNA, 156 bp, synthetic construct
  misc_feature 1..156: note = source = /note="Description of Artificial Sequence: Syntheticpolynucleotide"
  source 1..156: mol_type = other DNA
gcggcgggggggcggccgcgttcgcgcgccgcccaccagggggtgctgcgcgcccccccccgcgcatgcgcggggcccccccccgggggggctccgcccccccggcccccccccgtgctaaacccaccgcgcatgcgcgaccacgcccccgccgcc

SEQ ID NO: 711 - DNA, 115 bp, synthetic construct
  misc_feature 1..115: note = source = /note="Description of Artificial Sequence: Syntheticpolynucleotide"
  source 1..115: mol_type = other DNA
cggcggcggcggcgcgcgcgctgcgcgcgcgcgccgggggggcgccagcgcccccccccccgcgcatgcacgggtccccccccccacggggggctccgccccccggccccccccc

SEQ ID NO: 712 - DNA, 121 bp, synthetic construct
  misc_feature 1..121: note = source = /note="Description of Artificial Sequence: Syntheticpolynucleotide"
  source 1..121: mol_type = other DNA
ccgtcggcgggggggccgcgcgctgcgcgcgcggcccccgggggaggcacagcctcccccccccgcgcgcatgcgcgcgggtccccccccctccggggggctccgccccccggcccccccc

SEQ ID NO: 713 - DNA, 104 bp, synthetic construct
  misc_feature 1..104: note = source = /note="Description of Artificial Sequence: Syntheticpolynucleotide"
  source 1..104: mol_type = other DNA
cggcggcggcgcgcgcgctacgcgcgcgcgccggggggctgccgccccccccccgcgcatgcgcggggcccccccccgcggggggctccgccccccggcccccc

SEQ ID NO: 714 - DNA, 122 bp, synthetic construct
  misc_feature 1..122: note = source = /note="Description of Artificial Sequence: Syntheticpolynucleotide"
  source 1..122: mol_type = other DNA
gccgccgcggcggcggggggcggcgcgctgcgcgcgccgcccagtagggggagccatgcgcccccccccgcgcatgcgcggggcccccccccgcggggggctccgccccccggccccccccg

SEQ ID NO: 715 - DNA, 71 bp, synthetic construct
  misc_feature 1..71: note = source = /note="Description of Artificial Sequence: Syntheticoligonucleotide"
  source 1..71: mol_type = other DNA
cgggtgccgkaggtgagtttacacaccgmagtcaaggggcaattcgggctcrggactggccgggcyhtggg

SEQ ID NO: 716 - DNA, 79 bp, synthetic construct
  modified_base 20: mod_base = OTHER; note = a, c, t, g, unknown or other
  modified_base 22: mod_base = OTHER; note = a, c, t, g, unknown or other
  modified_base 40..42: mod_base = OTHER; note = a, c, t, g, unknown or other
  modified_base 53..56: mod_base = OTHER; note = a, c, t, g, unknown or other
  modified_base 62: mod_base = OTHER; note = a, c, t, g, unknown or other
  modified_base 64: mod_base = OTHER; note = a, c, t, g, unknown or other
  misc_feature 1..79: note = source = /note="Description of Artificial Sequence: Syntheticoligonucleotide"
  source 1..79: mol_type = other DNA
gccgccgcggcggcggsggngnsgcgcgctdcgcgcgcsnnncrccrgggggnnnncwgcsncncccccccccgcgcat

SEQ ID NO: 717 - DNA, 31 bp, synthetic construct
  modified_base 18..19: mod_base = OTHER; note = a, c, t, g, unknown or other
  misc_feature 1..31: note = source = /note="Description of Artificial Sequence: Syntheticoligonucleotide"
  source 1..31: mol_type = other DNA
gcgcgggkcccccccccnncggggggctccg

SEQ ID NO: 718 - DNA, 59 bp, synthetic construct
  misc_feature 1..59: note = source = /note="Description of Artificial Sequence: Syntheticoligonucleotide"
  source 1..59: mol_type = other DNA
ccccccggcccccccccgtgctaaacccaccgcgcatgcgcgaccacgcccccgccgcc

SEQ ID NO: 719-721 - skipped (3 entries)

SEQ ID NO: 722 - DNA, 25 bp, synthetic construct
  misc_feature 1..25: note = source = /note="Description of Artificial Sequence: Syntheticoligonucleotide"
  source 1..25: mol_type = other DNA
ttcgcgcgccgcccaccagggggtg

SEQ ID NO: 723 - skipped

SEQ ID NO: 724 - DNA, 17 bp, synthetic construct
  misc_feature 1..17: note = source = /note="Description of Artificial Sequence: Syntheticoligonucleotide"
  source 1..17: mol_type = other DNA
cgcccccccccgcgcat

SEQ ID NO: 725 - DNA, 17 bp, synthetic construct
  misc_feature 1..17: note = source = /note="Description of Artificial Sequence: Syntheticoligonucleotide"
  source 1..17: mol_type = other DNA
gcgcggggccccccccc

SEQ ID NO: 726 - DNA, 72 bp, synthetic construct
  misc_feature 1..72: note = source = /note="Description of Artificial Sequence: Syntheticoligonucleotide"
  source 1..72: mol_type = other DNA
gggggggctccgcccccccggcccccccccgtgctaaacccaccgcgcatgcgcgaccacgcccccgccgcc

SEQ ID NO: 727 - DNA, 14 bp, synthetic construct
  misc_feature 1..14: note = source = /note="Description of Artificial Sequence: Syntheticoligonucleotide"
  source 1..14: mol_type = other DNA
cggcggcggcggcg

SEQ ID NO: 728 - DNA, 17 bp, synthetic construct
  misc_feature 1..17: note = source = /note="Description of Artificial Sequence: Syntheticoligonucleotide"
  source 1..17: mol_type = other DNA
cgcgcgctgcgcgcgcg

SEQ ID NO: 729 - DNA, 19 bp, synthetic construct
  misc_feature 1..19: note = source = /note="Description of Artificial Sequence: Syntheticoligonucleotide"
  source 1..19: mol_type = other DNA
cgccgggggggcgccagcg

SEQ ID NO: 730 - DNA, 17 bp, synthetic construct
  misc_feature 1..17: note = source = /note="Description of Artificial Sequence: Syntheticoligonucleotide"
  source 1..17: mol_type = other DNA
cccccccccccgcgcat

SEQ ID NO: 731 - DNA, 31 bp, synthetic construct
  misc_feature 1..31: note = source = /note="Description of Artificial Sequence: Syntheticoligonucleotide"
  source 1..31: mol_type = other DNA
gcacgggtccccccccccacggggggctccg

SEQ ID NO: 732 - DNA, 17 bp, synthetic construct
  misc_feature 1..17: note = source = /note="Description of Artificial Sequence: Syntheticoligonucleotide"
  source 1..17: mol_type = other DNA
ccccccggccccccccc

SEQ ID NO: 733 - DNA, 37 bp, synthetic construct
  misc_feature 1..37: note = source = /note="Description of Artificial Sequence: Syntheticoligonucleotide"
  source 1..37: mol_type = other DNA
ccgtcggcgggggggccgcgcgctgcgcgcgcggccc

SEQ ID NO: 734 - DNA, 84 bp, synthetic construct
  misc_feature 1..84: note = source = /note="Description of Artificial Sequence: Syntheticoligonucleotide"
  source 1..84: mol_type = other DNA
ccgggggaggcacagcctcccccccccgcgcgcatgcgcgcgggtccccccccctccggggggctccgccccccggcccccccc

SEQ ID NO: 735 - DNA, 11 bp, synthetic construct
  misc_feature 1..11: note = source = /note="Description of Artificial Sequence: Syntheticoligonucleotide"
  source 1..11: mol_type = other DNA
cggcggcggcg

SEQ ID NO: 736 - DNA, 17 bp, synthetic construct
  misc_feature 1..17: note = source = /note="Description of Artificial Sequence: Syntheticoligonucleotide"
  source 1..17: mol_type = other DNA
cgcgcgctacgcgcgcg

SEQ ID NO: 737 - DNA, 10 bp, synthetic construct
  misc_feature 1..10: note = source = /note="Description of Artificial Sequence: Syntheticoligonucleotide"
  source 1..10: mol_type = other DNA
cgccgggggg

SEQ ID NO: 738 - skipped

SEQ ID NO: 739 - DNA, 15 bp, synthetic construct
  misc_feature 1..15: note = source = /note="Description of Artificial Sequence: Syntheticoligonucleotide"
  source 1..15: mol_type = other DNA
cccccccccgcgcat

SEQ ID NO: 740 - DNA, 17 bp, synthetic construct
  misc_feature 1..17: note = source = /note="Description of Artificial Sequence: Syntheticoligonucleotide"
  source 1..17: mol_type = other DNA
gcgcggggccccccccc

SEQ ID NO: 741 - DNA, 13 bp, synthetic construct
  misc_feature 1..13: note = source = /note="Description of Artificial Sequence: Syntheticoligonucleotide"
  source 1..13: mol_type = other DNA
gcggggggctccg

SEQ ID NO: 742 - DNA, 14 bp, synthetic construct
  misc_feature 1..14: note = source = /note="Description of Artificial Sequence: Syntheticoligonucleotide"
  source 1..14: mol_type = other DNA
ccccccggcccccc

SEQ ID NO: 743 - DNA, 117 bp, synthetic construct
  misc_feature 10: note = /note="May or may not be present"
  misc_feature 12: note = /note="May or may not be present"
  misc_feature 30..32: note = /note="May or may not be present"
  misc_feature 34: note = /note="May or may not be present"
  misc_feature 43..46: note = /note="May or may not be present"
  misc_feature 52..54: note = /note="May or may not be present"
  misc_feature 70..71: note = /note="May or may not be present"
  misc_feature 89..90: note = /note="May or may not be present"
  misc_feature 103: note = /note="May or may not be present"
  misc_feature 1..117: note = source = /note="Description of Artificial Sequence: Syntheticpolynucleotide"
  source 1..117: mol_type = other DNA
cggcggsggsgcsscgcgctdcgcgcgcsgcccrsyrggggrdssmmwgcskcscccccccscgcgcatgcgcrcgggkcccccccccyvsggggggctccgcccccccggcccccc

SEQ ID NO: 744 - DNA, 19 bp, synthetic construct
  misc_feature 1..19: note = source = /note="Description of Artificial Sequence: Syntheticoligonucleotide"
  source 1..19: mol_type = other DNA
gccgccgcggcggcggggg

SEQ ID NO: 745 - DNA, 41 bp, synthetic construct
  misc_feature 1..41: note = source = /note="Description of Artificial Sequence: Syntheticoligonucleotide"
  source 1..41: mol_type = other DNA
gcggcgcgctgcgcgcgccgcccagtagggggagccatgcg

SEQ ID NO: 746 - DNA, 15 bp, synthetic construct
  misc_feature 1..15: note = source = /note="Description of Artificial Sequence: Syntheticoligonucleotide"
  source 1..15: mol_type = other DNA
cccccccccgcgcat

SEQ ID NO: 747 - DNA, 17 bp, synthetic construct
  misc_feature 1..17: note = source = /note="Description of Artificial Sequence: Syntheticoligonucleotide"
  source 1..17: mol_type = other DNA
gcgcggggccccccccc

SEQ ID NO: 748 - DNA, 13 bp, synthetic construct
  misc_feature 1..13: note = source = /note="Description of Artificial Sequence: Syntheticoligonucleotide"
  source 1..13: mol_type = other DNA
gcggggggctccg

SEQ ID NO: 749 - DNA, 17 bp, synthetic construct
  misc_feature 1..17: note = source = /note="Description of Artificial Sequence: Syntheticoligonucleotide"
  source 1..17: mol_type = other DNA
ccccccggccccccccg

What is claimed is:

1. A synthetic curon comprising:
(i) a genetic element comprising a promoter element and a nucleic acid sequence encoding an exogenous effector, and a protein binding sequence, wherein the genetic element comprises one or both of:
(a) a sequence having at least 85% sequence identity to the Anellovirus 5′ UTR conserved domain nucleotide sequence of nucleotides 323-393 of the nucleic acid sequence of Table 11, or
(b) a sequence having at least 85% sequence identity to the Anellovirus GC-rich region of nucleotides 2868-2929 of the nucleic acid sequence of Table 11;
and
(ii) a proteinaceous exterior; wherein the genetic element is enclosed within the proteinaceous exterior; and
wherein the synthetic curon is capable of delivering the genetic element into a eukaryotic cell.

2. The synthetic curon of claim 1, wherein the genetic element is single-stranded.

3. The synthetic curon of any of the preceding claims, wherein the genetic element is DNA.

4. The synthetic curon of claim 3, wherein the genetic element is a negative strand DNA.

5. The synthetic curon of any of the preceding claims, wherein the genetic element integrates at a frequency of less than 10%, 8%, 6%, 4%, 3%, 2%, 1%, 0.5%, 0.2%, 0.1% of the curons that enters the cell, e.g., wherein the synthetic curon is non-integrating.

6. The synthetic curon of any of the preceding claims, wherein the genetic element comprises a sequence of the Consensus 5′ UTR nucleic acid sequence shown in Table 16-1.

7. The synthetic curon of any of the preceding claims, wherein the genetic element comprises a sequence of the Consensus GC-rich region shown in Table 16-2.

8. The synthetic curon of any of the preceding claims, wherein the genetic element comprises a sequence of at least 100 nucleotides in length, which consists of G or C at at least 70% (e.g., about 70-100%, 75-95%, 80-95%, 85-95%, or 85-90%) of the positions.

9. The synthetic curon of any of the preceding claims, wherein the genetic element comprises a sequence having at least 85% sequence identity to the Anellovirus 5′ UTR conserved domain nucleotide sequence of nucleotides 1-393 of the nucleic acid sequence of Table 11 and a sequence having at least 85% sequence identity to the Anellovirus GC-rich region of nucleotides 2868-2929 of the nucleic acid sequence of Table 11.

10. The synthetic curon of any of the preceding claims, wherein the genetic element comprises at least 75% identity to the nucleotide sequence of Table 11.

11. The synthetic curon of any of the preceding claims, wherein the promoter element is exogenous to wild-type Anellovirus.

12. The synthetic curon of any of claims 1-10, wherein the promoter element is endogenous to wild-type Anellovirus.

13. The synthetic curon of any of the preceding claims, wherein the exogenous effector encodes a therapeutic agent, e.g., a therapeutic peptide or polypeptide or a therapeutic nucleic acid.

14. The synthetic curon of any of the preceding claims, wherein the exogenous effector comprises a regulatory nucleic acid, e.g., an miRNA, siRNA, mRNA, lncRNA, RNA, DNA, an antisense RNA, gRNA; a fluorescent tag or marker, an antigen, a peptide, a synthetic or analog peptide from a naturally-bioactive peptide, an agonist or antagonist peptide, an anti-microbial peptide, a pore-forming peptide, a bicyclic peptide, a targeting or cytotoxic peptide, a degradation or self-destruction peptide, a small molecule, an immune effector (e.g., influences susceptibility to an immune response/signal), a death protein (e.g., an inducer of apoptosis or necrosis), a non-lytic inhibitor of a tumor (e.g., an inhibitor of an oncoprotein), an epigenetic modifying agent, an epigenetic enzyme, a transcription factor, a DNA or protein modification enzyme, a DNA-intercalating agent, an efflux pump inhibitor, a nuclear receptor activator or inhibitor, a proteasome inhibitor, a competitive inhibitor for an enzyme, a protein synthesis effector or inhibitor, a nuclease, a protein fragment or domain, a ligand, an antibody, a receptor, or a CRISPR system or component.

15. The synthetic curon of any of the preceding claims, wherein the exogenous effector comprises an miRNA, and decreases expression of a host gene.

16. The synthetic curon of any of the preceding claims, wherein the exogenous effector comprises a nucleic acid sequence about 20-200, 30-180, 40-160, 50-140, or 60-120 nucleotides in length.

17. The synthetic curon of any of the preceding claims, wherein the nucleic acid sequence encoding the exogenous effector is about 20-200, 30-180, 40-160, 50-140, or 60-120 nucleotides in length.

18. The synthetic curon of any of the preceding claims, wherein the sequence encoding the exogenous effector is situated at, within, or adjacent to (e.g., 5′ or 3′ to) one or more of the ORF1 locus, e.g., at the C-terminus of the ORF1 locus, or the 3′ noncoding region downstream of the poly-A region.

19. The synthetic curon of any of the preceding claims, wherein the sequence encoding the exogenous effector is located between the poly-A region and the GC-rich region of the genetic element.

20. The synethtic curon of any of the preceding claims, which comprises (e.g., in the proteinaceous exterior) one or more of an amino acid sequence chosen from ORF2, ORF2/2, ORF2/3, ORF1, ORF1/1, or ORF1/2 of Table 12, or an amino acid sequence having at least 85% sequence identity thereto.

21. The synthetic curon of any of the preceding claims, wherein the portions of the genetic element excluding the effector have a combined size of about 2.5-5 kb (e.g., about 2.8-4 kb, about 2.8-3.2 kb, about 3.6-3.9 kb, or about 2.8-2.9 kb), less than about 5 kb (e.g., less than about 2.9 kb, 3.2 kb, 3.6 kb, 3.9 kb, or 4 kb), or at least 100 nucleotides (e.g., at least 1 kb).

22. The synthetic curon of any of the preceding claims, wherein the synthetic curon does not comprise a lipid bilayer.

23. The synthetic curon of any of the preceding claims, wherein the synthetic curon is capable of infecting mammalian cells, e.g., human cells, e.g., immune cells, liver cells, or lung epithelial cells.

24. The synthetic curon of any of the preceding claims, wherein the genetic element is capable of replicating, e.g., capable of generating at least 10², 2×10², 5×10², 10³, 2×10³, 5×10³, or 10⁴ genomic equivalents of the genetic element per cell, e.g., as measured by a quantitative PCR assay.

25. The synthetic curon of any of the preceding claims, which is substantially non-pathogenic, e.g., does not induce a detectable deleterious symptom in a subject (e.g., elevated cell death or toxicity, e.g., relative to a subject not exposed to the curon).

26. The synthetic curon of any of the preceding claims, which is substantially non-immunogenic, e.g., does not induce a detectable and/or unwanted immune response, e.g., as detected according to the method described in Example 4.

27. The synthetic curon of claim 26, wherein the substantially non-immunogenic curon has an efficacy in a subject that is a least about 10%, 20%, 30%, 40%, 50%, 60%, 70%, 80%, 90%, 95%, or 100% of the efficacy in a reference subject lacking an immune response.

28. The synthetic curon of claim 26 or 27, wherein the immune response comprises one or more of an antibody specific to the curon; a cellular response (e.g., an immune effector cell (e.g., T cell- or NK cell) response) against the curon or cells comprising the curon; or macrophage engulfment of the curon or cells comprising the curon.

29. The synthetic curon of any of the preceding claims, wherein a population of at least 1000 of the synthetic curons is capable of delivering at least 100 copies of the genetic element into one or more of the eukaryotic cells.

30. A synthetic curon comprising:
(i) a genetic element comprising a promoter element and a nucleic acid sequence encoding an exogenous effector, and a protein binding sequence, wherein the genetic element comprises one or both of:
(a) a sequence having at least 85% sequence identity to the Anellovirus 5′ UTR conserved domain of the nucleic acid sequence of Table 1, 3, 5, 7, 9 or 13; or
(b) a sequence having at least 85% sequence identity to the Anellovirus GC-rich region of the nucleic acid sequence of of Table 1, 3, 5, 7, 9 or 13;
and
(ii) a proteinaceous exterior; wherein the genetic element is enclosed within the proteinaceous exterior; and
wherein the synthetic curon is capable of delivering the genetic element into a eukaryotic cell.

31. The synethtic curon of claim 30, which comprises (e.g., in the proteinaceous exterior) one or more of an amino acid sequence chosen from ORF2, ORF2/2, ORF2/3, ORF2t/3, ORF1, ORF1/1, or ORF1/2 of any of Tables 2, 4, 6, 8, 10, or 14, or an amino acid sequence having at least 85% sequence identity thereto.

32. A nucleic acid molecule comprising a promoter element and a nucleic acid sequence encoding an exogenous effector, and a protein binding sequence, wherein the genetic element comprises one or both of:
(a) a sequence having at least 85% sequence identity to the Anellovirus 5′ UTR conserved domain nucleotide sequence of nucleotides 323-393 of the nucleic acid sequence of Table 11, or
(b) a sequence having at least 85% sequence identity to the Anellovirus GC-rich region of nucleotides 2868-2929 of the nucleic acid sequence of Table 11.

33. A nucleic acid molecule comprising a promoter element and a nucleic acid sequence encoding an exogenous effector, and a protein binding sequence, wherein the genetic element comprises one or both of:
(a) a sequence having at least 85% sequence identity to the Anellovirus 5′ UTR conserved domain nucleotide sequence of the nucleic acid sequence of Table 1, 3, 5, 7, or 13, or
(b) a sequence having at least 85% sequence identity to the Anellovirus GC-rich region of the nucleic acid sequence of Table 1, 3, 5, 7, or 13.

34. A pharmaceutical composition comprising the synthetic curon of any of the preceding claims, and a pharmaceutically acceptable carrier or excipient.

35. The pharmaceutical composition of claim 34, which comprises at least 10³, 10⁴, 10⁵, 10⁶, 10⁷, 10⁸, or 10⁹ synthetic curons.

36. A reaction mixture comprising the synthetic curon of any of claims 1-31 and a second nucleic acid sequence encoding one or more of an amino acid sequence chosen from ORF2, ORF2/2, ORF2/3, ORF1, ORF1/1, or ORF1/2 of Table 12, or an amino acid sequence having at least 85% sequence identity thereto.

37. A reaction mixture comprising the synthetic curon of any of claims 1-31 and a second nucleic acid sequence encoding one or more of an amino acid sequence chosen from ORF2, ORF2/2, ORF2/3, ORF2t/3, ORF1, ORF1/1, or ORF1/2 of any of Tables 2, 4, 6, 8, 10, or 14, or an amino acid sequence having at least 85% sequence identity thereto.

38. The reaction mixture of claim 36 or 37, wherein the second nucleic acid sequence is part of the genetic element.

39. The reaction mixture of claim 36 or 37, wherein the second nucleic acid sequence is not part of the genetic element, e.g., the second nucleic acid sequence is comprised by a helper cell or helper virus.

40. Use of a synthetic curon of any of the claims 1-31 or the pharmaceutical composition of any of claims 34-35 for delivering the genetic element to a host cell.

41. Use of a synthetic curon of any of the claims 1-31 or the pharmaceutical composition of any of claims 34-35 for treating a disease or disorder in a subject.

42. The use of claim 41, wherein the disease or disorder is chosen from an immune disorder, an interferonopathies (e.g., Type I interferonopathy), infectious disease, inflammatory disorder, autoimmune condition, cancer (e.g., a solid tumor, e.g., lung cancer), and a gastrointestinal disorder.

43. A synthetic curon of any of claims 1-31 or the pharmaceutical composition of any of claims 34-35, for use in treating a disease or disorder in a subject.

44. A method of treating a disease or disorder in a subject, the method comprising administering a synthetic curon of any of claims 1-31 or the pharmaceutical composition of any of claims 34-35 to the subject, wherein the disease or disorder is chosen from an immune disorder, an interferonopathy (e.g., Type I interferonopathy), infectious disease, inflammatory disorder, autoimmune condition, cancer (e.g., a solid tumor, e.g., lung cancer), and a gastrointestinal disorder.

45. A method of manufacturing a synthetic curon composition, comprising:
a) providing a plurality of synthetic curons according to claims 1-31, or a composition or pharmaceutical composition of any of claims 34-35;
b) optionally evaluating the plurality for one or more of: a contaminant described herein, an optical density measurement (e.g., OD 260), particle number (e.g., by HPLC), infectivity (e.g., particle:infectious unit ratio); and
c) formulating the plurality of synthetic curons, e.g., as a pharmaceutical composition suitable for administration to a subject, e.g., if one or more of the paramaters of (b) meet a specified threshold.
